United States Patent Application Publication US 2024/0180975 A1 - sequence listing, part 5

SEQ ID NO: 2 - DNA, 4708953 bp, Chryseobacterium massiliae (residues 1,569,652-3,139,302 of 4,708,953)
  misc_feature (1)..(10): Whole genome sequence of Chryseobacterium massiliae strain with Accession Number No. I-5479 deposited at the CNCM on January 24, 2020 (UGB 3610)
  misc_feature (52128)..(52227): n is a, c, g, or t
  misc_feature (57176)..(57275): n is a, c, g, or t
  misc_feature (127328)..(127427): n is a, c, g, or t
  misc_feature (264557)..(264656): n is a, c, g, or t
  misc_feature (577519)..(577618): n is a, c, g, or t
  misc_feature (832056)..(832155): n is a, c, g, or t
  misc_feature (1015295)..(1015394): n is a, c, g, or t
  misc_feature (1148193)..(1148292): n is a, c, g, or t
  misc_feature (1240204)..(1240303): n is a, c, g, or t
  misc_feature (1322067)..(1322166): n is a, c, g, or t
  misc_feature (1422620)..(1422719): n is a, c, g, or t
  misc_feature (1441272)..(1441371): n is a, c, g, or t
  misc_feature (1535166)..(1535265): n is a, c, g, or t
  misc_feature (1604409)..(1604508): n is a, c, g, or t
  misc_feature (1841729)..(1841828): n is a, c, g, or t
  misc_feature (2034579)..(2034678): n is a, c, g, or t
  misc_feature (2097389)..(2097488): n is a, c, g, or t
  misc_feature (2122447)..(2122546): n is a, c, g, or t
  misc_feature (2149320)..(2149419): n is a, c, g, or t
  misc_feature (2241640)..(2241739): n is a, c, g, or t
  misc_feature (2418169)..(2418268): n is a, c, g, or t
  misc_feature (2526058)..(2526157): n is a, c, g, or t
  misc_feature (2600368)..(2600467): n is a, c, g, or t
  misc_feature (2645520)..(2645619): n is a, c, g, or t
  misc_feature (2702878)..(2702977): n is a, c, g, or t
  misc_feature (2743425)..(2743524): n is a, c, g, or t
  misc_feature (2769562)..(2769661): n is a, c, g, or t
  misc_feature (2791670)..(2791769): n is a, c, g, or t
  misc_feature (2831479)..(2831578): n is a, c, g, or t
  misc_feature (2892648)..(2892747): n is a, c, g, or t
  misc_feature (2907074)..(2907173): n is a, c, g, or t
  misc_feature (2982010)..(2982109): n is a, c, g, or t
  misc_feature (2998194)..(2998293): n is a, c, g, or t
  misc_feature (3058467)..(3058566): n is a, c, g, or t
  misc_feature (3085967)..(3086066): n is a, c, g, or t
  misc_feature (3104907)..(3105006): n is a, c, g, or t
  misc_feature (3120891)..(3120990): n is a, c, g, or t
  misc_feature (3215008)..(3215107): n is a, c, g, or t
  misc_feature (3325682)..(3325781): n is a, c, g, or t
  misc_feature (3726420)..(3726519): n is a, c, g, or t
  misc_feature (3782267)..(3782366): n is a, c, g, or t
  misc_feature (3825410)..(3825509): n is a, c, g, or t
  misc_feature (3899108)..(3899207): n is a, c, g, or t
  misc_feature (3942556)..(3942655): n is a, c, g, or t
  misc_feature (4030724)..(4030823): n is a, c, g, or t
  misc_feature (4087928)..(4088027): n is a, c, g, or t
  misc_feature (4137347)..(4137446): n is a, c, g, or t
  misc_feature (4183291)..(4183390): n is a, c, g, or t
  misc_feature (4206113)..(4206212): n is a, c, g, or t
  misc_feature (4270010)..(4270109): n is a, c, g, or t
  misc_feature (4346130)..(4346229): n is a, c, g, or t
  misc_feature (4353347)..(4353446): n is a, c, g, or t
  misc_feature (4401203)..(4401302): n is a, c, g, or t
  misc_feature (4438546)..(4438645): n is a, c, g, or t
  misc_feature (4465525)..(4465624): n is a, c, g, or t
  misc_feature (4469805)..(4469904): n is a, c, g, or t
  misc_feature (4473602)..(4473701): n is a, c, g, or t
  misc_feature (4591584)..(4591683): n is a, c, g, or t
  misc_feature (4597196)..(4597295): n is a, c, g, or t
  misc_feature (4620362)..(4620461): n is a, c, g, or t
  misc_feature (4629512)..(4629611): n is a, c, g, or t
  misc_feature (4635880)..(4635979): n is a, c, g, or t
  misc_feature (4654440)..(4654539): n is a, c, g, or t
  misc_feature (4702440)..(4702539): n is a, c, g, or t
  misc_feature (4705724)..(4705823): n is a, c, g, or t
aaatcaacggattattggttcctttttttattgaaaagtcagcatggagcaaaaacgatgcgctcaacattgcttttaaaaactcttcggaagccttggtagaccagtctttgggaaaagatgtgtatttaccgttgtctacattgcctaaacttaccggaaagcaattttattaccatgaaatcatcgggtacaatatccatgatgaaaatgataacgactgtggagtgatccgttccgtaaacgatcagacagcgcaggtttactttatcaccaatctcgatggaaaagaagtggtaatccctatcatcaaagactggatcttagaagtgaacagagatgaaagattcatcaaaatgcatcttccggaaggtcttattgatgttttcttggttccttccaagaaagacgaataaattttacaaataattttgctgcttacattttagtattcagtttctttttcaaatcctcaatctgagtatacattcggttaaaaaatatttttcggtcccggtttcccgaagtattcatcgattttgaattttttatctgatgctcaaaataattcaaggtttcggtacatgtcttttcatcgttaatcagaatatagccaaacatattggtcggaatagcaaacagtgactgttgaggatgatgaaaaaagatgtcattggaaagatgcatcagttcattttcatataattgaaatttaagattgttttctgttttttcctcaatatactgtataagttccgttaattcatttaaaataatccgagcctcactctgtttcaggtgtcccgtttcagaataaaacaaaatttgctgtaggatgctcgaaatggtactattattccataactcaataacattctgttcctcatatttcttcctgagttcttttgtgtcgagtttaaaatcgggaggcgaaaactgcataaaaggaatgaaaacctgtttggaattaagcagattcatccatacatatactttaaaacgagaaagcatcgaatctgaaagcgtgtagaaaaacggaatgtctttcgccgaataatagatcgtcattccttttgaaagaggaaggttttcaaacacattgagattgttctggaaaaatgcttttaaatcttctgtttccgtaacaacacttgtttttcttactataatctgccggtcagaagtctgaaactgatccagagaaatctgaaaatactttgccagttccaaagcttcctctaaactgaattttgctttcagggaagttcttcggtgtgccgcatcgtagctgatattgagaatgttggcaatttcgtcattcagagatttttcgccaatcttttttcggatttctttaagcaaacgttcctgatacatggtttttgcgattttcacaaatgtagagatttattttaattttttttcgcatttatgaaacagcttttcaagtatagctttgaggtgtaatttttaaaataaacaatcatgaaaaattttgtattaatcattgcgctgtctttttgcagttttgtaaacgcacaaatcggcaacaaaaaagactgggcaattataggatcaattatttgtactcgtctcgaattaaccatcatgaatgataaatcttttctttctttcggtccgaaaattcctcttaatgaaaataattatgtgagtttaagagggcatttcaattggtgggatacaccggaaagaaaatttattgttattccggaactggattatttttacaaagttgcagattttaaagaaaaaagtatgataaccaatttgtataccggcgctggaattactccatatgcggtatcaccaaaatttggaatagttttttaccattttatttctgctgaagcgggttataatattgaatatgaaccttacaagtatttttctacttcgggtttcagattttctttgggatttaatttagtcttctaaatcttaaaaaaaacaattgaaatgaaaacaataccttatctattaatcgccacaagattttgtttggctccaatcatccttttgttagcttattttaaaggagagcaatcccgatttttaattttaagcttaatgtattttggtttattaacggatattttcgacggaatcatcgcacgaaaagtcggtgtttcttccgaaaaactgcgacgtttagacagtcagaccgatttgatattctggctttctcttggatttgcttcttactttttaaatgctgaattaataaaaaacgaatggaaaggagttgctctaattttcataatggaagcactttgctatatgataagctggttaaaattcgggaaagagacctgtactcacgcttttttatcaaaaatgtggggattgagtttactgatcgctttcacctgtttaattggatttcaacaggcaggatggactttttatcttaccgttattttaggatttatttcgcacattgatgtaattttaattattttaatccttcccaaatggcaatatgatgttccgagttcttatcatgcatggaaaattaggaaaggaaaacagagaaaaaaatcgattttctttaattgattcttatttaaagcataattttttgagtaattaattgataaatgaactgaattaaaacagtgtaatcctcaaattgcgctgtttttttgtaactttgcagacattaatttttacagaaaaattttaatcaacaaatgaaaaagcagaccattaaggaaatcctacattattacaagaaagtattacatcatgacattacggtttacggttgggtaagaacgttccgtgcgaatcgcttcattgcgcttaatgatggttctacgattaataatttgcagattgttgttgattttgaaaatttcgacgaagagattatcagcaaaatcagtacggcttcttcccttaaaattgttggagaagtggtggaaagtcagggaacaggacaggctgttgagattttggctaaaaaaattactattttaggagataatttcacggaagaaagagacaaaacgattcttcagcctaaaaaacactcattagaaactttgagagatcaggcgcatttgagattcagaaccaacttgttcggagccgttttcagagtgcgtcatgcggtgagttttgcggtacattctttctttaaccaaaaccagtttttctacatcaacacaccggttattacaggagctgatgcagaaggagccggagaaatgttcggagtaacgaattttgatctgaacaatattccgagagatgagcagggagacatcgatttctctcaggattttttcggaagaaaaacaaatttaacggtttccgggcagcttgaaggagaaactgcagcgatgggattgggaagaatttatactttcggacctactttccgtgcagaaaactcaaatacaacccgtcacttggcagaattctggatgatagagccggaagtggcttttaacaaccttgaggataacattgatcttgcagaagatttcttaaaatatgtaattaaatatgtattggatcactgcaaagacgatcttgagttcttagacaaacgttttgaggaagagcaaaaatccaagcctgaaaaagacagagctaaagaaggtcttattgaaaagcttgaaaatgtaattgcgaaacgcttcaagagagtttcttatacagaagctatcgagattttaatgaactcaaaagaaaataagaaaggaaaattccagtatccggtggaaaactggggaaccgatcttcagtctgagcacgagagatatctggtagaaaaacatttcgaaagtccggtagttctgtttgattatccaaaagaaattaaagcgttctacatgaaactgaatgaagacggtaaaaccgttgctgcgatggacgttcttttccccggaatcggagaaatcataggtggttccgaaagagaagccagactggatattcttaagcagaaaatggtagaaatgcatgttgatgaacacgaattgtggtggtatttagatacaagaaaatttggttctgttccgcacgcaggatttggtctgggattggaaagactggttcttttcgtaacaggaatgacgaacatcagagatgtaattcctttcccgagaactccgaaaaacgctgaattttaatttttaataaaaacatatagaaatccttctgagaacatcggaaggatttttttattaactttacctaaaataatgatgatgagcacaattaccatacatacggaaaacgaaaatcagatcaatcttctgaaagctcttctgaaagaactgaaaattaattttgaaattgataaagaagaaaaacttacggattggcagaaaaagcaattgctaaagggtataaatgaggctgataaaggagattttgttagtaaagaggatgctaaagaaattttggatcaatgtttcagataaaatggactcgtatggcattattatcctttgctgataccctcaaatattggattgctcataattctttccaaacttattcaaaaaaattaagaaaagaagttgagaaaaaagaaaaacttatcgccgaaaatccgaatataggttcttcctctgaatttgatgatgtgaaatatgttttgattgataaaaatttttcaatgtattatcgggtcaacaaaaaggttattgaaattcttgccttttgggataacagaagagatccggaaaatttgaatgtataaaaattaaaaagccctgaaaatcaagcttcagggcttttgttgtttattttaaatagcttattataccatattgaatacaaaaatcgtgctaaaatttagttttctcaaaaaaaagtgttaaattcgtaaaatatgttatgttaaaacaccaactagtaatatgctaaaacaacacttacaactcaaattaggacaaaagctggctccccagcaaatccagttaatgaagttgatccagcttcatacattggagtttgaagaggaacttgaaagggagttagaagaaaatccggcattggagatcgcaaaagaagaatctaaagaggacgattattcttctctggaagattcatatgaaacagaaggtacggaaagcattgaaacagattttgatgtagaccagtatctttatgatgatgaaccaagctataaaacatcttccagtaattattcttcggacgacgaagaatttgataatgaaagtcttttaacggaaggacagtcattatacgattatcttttggagcagatccatcttgccaacatcaataaagaagatttgaagatcgcagaatatcttatcgggaatctcgatacagacggatatttaagaagggaaataaaatctattgtggatgatctggctttttctcagggaatttatactactaaagaatatgtggaagatatccttgaaaattatgtgcagaaactggatcctcccggagtaggagcgcgaggtcttcaggaatgtctgctgctgcagattgagaaaaaagtaagctcagataaagccgtttctcttgctgccaatattctgagacatcagtttgatgctttaacgaacaagcattacaacaagatcattcagaaatacgatattgaggaagaagatctgaaggatgctttggacgaaatttcaaaattatctccaaaagttggcggaaatttcgatactcagacgattacaatcaatcaggaaattattccggattttgtgattcaggtgaaagacggacaggttatcccgatgctgaacagtaaaaatgcacctactttaagagtttcagaagaatataaagatattttatccacttattctcacgataaaaattctgccgaacacaaacaggctgctttattcatcaaacaaaaactggatgcagcaaaatggtatattgatgccattaatcagcgccagaatactttattgcaaaccattacagccattgtgaagtttcagaaagattatttccttacgggagatgaaaaatctttgagaccaatgattcttaaggatattgccgatattacaggcttcgatatttcaacaatttccagagtagtaaaaagtaaatatgcagatacaccgaacggaattatttaccttaaagatctgttctcagacagtttaacaaatgatgacggagaggaagtatctacaaaagaaattaaaactcatcttcaggaagtaatcagcaaagaaaataagagaaagcctttaacagacgacgctttggtggtgatcttaaaagagcagggatacaatattgcgagaagaacaattgcaaaatatcgggaacagcttaatattccggtagcaagattaagaaaagaactctaaaaataacagaaaagcatttcaaactgaaatgctttttttaattatccataaagttgtatctcattctgaaacagcctgaaaagattcgaacgaagttgaaagaaactccattcgtaaaagtggattcttcgctacaaatgacaaggtctttaaatctttgccttatctaatcccagttcttttacagaaacttcacgcatttcaacctttcgcacttttccggagatcgtcatcgggaattcgtctacaaacttccagtatttcggaactttataatgggcgatcctgcctttacaatactctaagagttcttcttcggttacctcgaatccttttctaacttttacccatgccatcacttcttctccaaatttctcgcttggaactccgatgatctgaacatctaaaatattcggataagtgtacaaaaagtcttcaatttctttcggcgagatattttcaccgccacggataatcaggtctttaatccttccggaaatggtaatgtagccttcatcatccattactgccatatctccggtatgcatccatcttccttcatccagaacctttctggtgttttcaggatcgttccagtatttcagcatcacagaataacctctggtacacagttccccatgttcgccacgcgatacaatttttccgttttcatcaactatttttatttccagatgatcctgaacggttcccaccgtattcacctgcttttcaaatggagttccgatcagggtttgcgtagagacaggagaggtttccgtcattccgtaacagatgctcatttccttgatattcataagactttctacttttttcataatttctggcggacaaacggaaccagccatgacccccgttcttaaacttgaaaaatcaaaagtttcgaaattttttaccgctaattcggcaataaacatggtgggaactccgtaaagcgaagtacatttttcatcagaaacaacttttaaagtaatttcaggatcaaaactgtcattcggaatcaccatacaggctccgtgagaggtacagcaaatatttccgatcaccattccgaaacagtgataaaagggaacaggaatgcagactctgtctttttcggtatactttaatcgaattccgataaaatatccgttgtttaaaatattatgatgagaaagagtgacgcctttaggaaaaccggtcgttcctgaagtgtactgaatgttgaccggatcatcaaactgtacatgttcttcaaaactatgcaatgtgtcatccgaaatttcctgtccgttatttaaaaactcttcccagttgtcatcaaagaaaatttcagattttaaagtcgagcagaactctcttgcatcggcaatcatctgtttataatcgctggatttaaaagccagagatgaaaaaatatgggacatttcagactgattgattacaaagatcagctcgctggttctgtaagcgggatttatgttcaccaaaataactccgattcttgcggttgcatattgtaaaagaacccattcgtagcggttcgtagaccagattccgatgcggtctccggattttgctcccaaaaagatcaaagcttttgcaacggctgttgtctgattataaaattcctgataagtggcgcggtaattttgatgtacgcagattaaagcttcctgattggggaatttttcaacggtatgtttaagattgcttccgatggtttcacctaataatggaatgtcggaactaccgtgaacataagatattggcatagaataaaagatttggttaaataaaattaacaataatatcttaaattcctgcttttttcggtttaaatttcctgagaatcgatttcttttaactgagttaaattcttatcaagttttttaatgataattccataaaccactctgtaatacagccacaccattattactgtaaaaacagtgcttatgatgataccggctacaaatcctataagggtggagttggtaatctctacattctgagtatttaaaatgtaaaaaacaaagattgtgaaaatagaggtgaaagtgattaataacgcaatattaattaaaataaacgcgtttactgtctttttaaatgtaatgatctgaaggataaattttttaagattttcctcaatttttataaccttgtaattttgataaaatttaaatacaaaatatgcagtaatggctaagcttagaacttttaagaccagataaatattatcaaatgtattttctaattccgaagttctctgtacaccgagtttcgtaagaatattaatgaaagagttggattcctttccctgaatgatgtagaataatcctattaaagtaaagaataaaaattcgaaaacactgatccagaaaatatacttcacataattgcgcgattttttgttgagcatctgaaggatctcattataatcatatttttcctgaacaggctgttcctgccatgttttcttaaaactgtctaaatcaaattcaggcatatttttccatctgttctttaagggttttctttaatctgttcattttcacacgcgcatttacttcggttatcccgaggttttctgcaatatccttataaggcaaatcatccagatacatcatcacgattgctctttccacattgggaagcgtcttgattactgtatacaaaagtgatacctgttgctgtttttcatcatcatcttccacaaaatctgcatgattaatgtccagttcattagtctgtaaacttttgcttttttttctgaaaagggtgatagcggtatttaaagcaacacggtacatccaagtagaaattttggaatttcctttaaatgagtcataacttctccacaattgtaacacaatttcctgaaaaagatcttcctcgtcctccaaagaattggtgtaaagacgcgaaactttaataatcagaccctgattatccttaataagctgcgcaaattctttttcctttgaagccaattgggatgtttaattttgtagcacgaagatatgatataatttgagaatttgaaaatttaagtaatttgaaaatgaatgaataacatgaaattaaagcaatcatttttttgcagattaaaaattttcaaattatcacattgccaaattttcaaattatctatctttgcagccacgagaaaatcggcttgttgatttcccgtttcacgggaggtaggaaagtccggacaccgtagagcagcaaagcggataacatccgtcacccgcgagggtaggacaagtgcaacagaaaggatgtacagttcggctgtagtgaaaccaggtaaactctttgtggtgcaatgataagtatatcggttcttttcagcaatgaaaataggagttgctcgctctgaaagccgaggggtaatcagctaaagttttgcagcaatgtaagacgcagataaataacaggcacttcttcggaagaacaaaatccggcttatagattttctcgtggttttttaagagttggaagttagaggcttgaagaagaaagtctttaatgcaatcatttaaacctccatcttcaggctcccatcttccctccaatttatttctcgctttccagttgtttttttgcttcttctaaatctttacgatcctcttcagacaatttaggatactgcagattcattttttccaaagcatcaataataatctgtatcgcggcaactcttgcaaaccatttattatcagccggaagaacataccaaggcgcgtaatcttttgaagtctcgttgattgccgtttcgtagcattccatatatttttcgaataaagctctctccggaagatccgcggcggaaaatttccagtttttttcctgttcgttaattctgtccagaagtcttttcttttgctcgtctttagaaacattcaggaatatttttacaacggtcgttccgttttgggcaagatgcttttcaaaatttctgatgctttcatagcggttttcccagaatttatcatcaaaatccttaacagatttccatgttttttcgcttaaattatattcaggatgaactttgcagaccagtacactttcgtaatgagaacggttaaaaattccgatcatgcctttttggggtaatgctaaataatgcctccacaaaaaatcatgggcatattcttttgaagtgggagttttgaagctcgtcacgttacagccttgcggattcactcccccgaaaacgtgctcaatcatgctgtcttttcctgcggcatccatcgcctgaagtaccactaaaagagactggcttccatccgaatacaatttctcctgaagctcacgaagcttttctttttcttttaataataattgttccccttcttctttggtaagttttcctttgtattctgttgaagcttttttaatggaaaattttcctttaattaaaaaatcgtctgaaaagttagtgtccatgtttattttaaattattaaaaagattaaagattaaagattaaagattaaagattaaagattaaagattaaagattaaagattaaagattaaagattaaagattaaagattaaagattaaagattaaagattaattttggtcataatttatagcaaaaaaccgttaatcatcaactaacctcatataaatgtaataaaaaaaccgcctccatgagacggtttcgtttattttagtagagattttaccattatgcagcagttttagcagcagctttagccgctttttttgcagcctttttcgcagctttcgcagccgctttctcttctttagctttagctttcaattcttcaggagtcaatggctttggatccggagcattagggtctacgtttcctttgatgtagattacacttctgctgtttacaggatcgttagaaaatacttcgatcattttgttaaaaccaccgttgattgcagtattgtatcctaccttgattttagctgattttccgggtagaataggatcctggctgaattccggagttgtacatccgcaagatgcttttacattcgataaaataagaggcttatctcctgtattggttaccgtaaagaatctgataccgtctgaacttggctttacatttccgtaatcgaaagtagttttgtcaaacgtaatcgtttgtgcagatgcaagagcgaaggttccgaataatgcaattcctgcgattaattttttcatattcttgaatattaaatatgttgttagataaattttgagaaacaaagttaaaaattattttaattcatacttaaaatatttttctttagactatttttgcaaattgtaaattaaagtaaaagaatttatgcagatttcagaaaagtacaatccacaggaaacagaacaaaagtggtacaattactggttggaaaataaatacttccattcagaacccaatgacaagccgccttacactgttgtaattcctccgccaaacgttacggggattttgcatatggggcatatgcttaacaataccattcaggatgtgctggtccgtcgtgcaagaatgcagggctttaatgcttgctgggttccgggaacagatcacgcttccattgctacagaagcgaaagtggttgctaaactgaagtctgaaggagtcaataaatctgatactacaagagaagagtttttaaaacacgcctgggaatggaccgataaatacggaggaacaattcttgagcagcttaaaaaattaggatgttcatgcgattgggaaagaacccgtttcacgatggagccgaaactttctcagcaggtgattaaatcttttgttgatctttacaataaaggattgatttaccgtgggtacagaatggtaaactgggatcccgaagcaaaaaccaatatttccgatgaagaagtaatctttaaggaacagaatgggaaattatatttcctgaaatataaaattgaatcttcgacaggctcagataccgatgaatatttgtcagtggcgacaacgcgtccggaaactattttcggggatactgcggtgtgtatcaatcctaatgatgaaagatacgctcatttaaaaggtaaaaaagtaatcgtaccaatcgttaatagggtaattcctattatcgaggacgaatatgtggatatcgaattcggaacaggtgctttgaaaattacgcctgctcacgacatcaatgattacgaaatcggacaaaaacacaatcttcagatgattgatgctttggatgatgacggaaatctgaacgatcacgggttgcattacgccggaaaaaacagattcgaagtaagaaagcagattgccaaagaactggaagaaaaagagcttttgctgaaagcagaagattatgtaaataaagtaggaacttcagaaagaacaggtgcggtaattgaacctaaagtttctgtacagtggtttctgaaaatgtctgaaattgcaaaaccagctttggatgttgtgatggatgatgaggttaaattttatcctgaaaagtttaaaaatacctacaagcactggatggaaaacatccgtgactggaatatttcccgacagctttggtggggacagcaaattcctgcgttctattatggtgacgaagaaaatgatttcgttgtagccgaaaatatcgaagaagcattagaacttgcaaagcaaaaaaccaacaacgatcaactgacaactgacaacttaaaacaagatgaggatgctttagatacatggttctcttcatggttgtggccaatgtctgttttcgatggactgcttgatcctgaaaataaagacatcaattattattacccgacttcagatttggttacaggtccggatattattttcttctgggtagcaagaatgattatggcagggttggaatacagaaaagaagttccgtttaaaaatgtttatttcacaggaattgtaagagataagcagagaagaaagatgtctaaatctttaggaaattcaccggatccgttagaattaatggataaatacggagcagatggagttcgtgtaggaattttattaagttctgcagccggaaacgatcttctttttgatgaagatttgatgcttcagggaagaaacttcatgtcaaagatctggagtgctttccgattgatcaatatgtggaaccatgaagataaacctgccaattcaacagaacttcagacaattgaatggtttgaaaataaattaaataaaacaattgctgagatcaacgatcagtttgaaaagttcagaatttctgatgctttgcatttgatttataaattaatttgggatgatttctgttcttggtatttagaagcaatcaaaccaaactatggagaaggaatttctaaggaagtttacaataaaaccgttgctctttttgaggagttaataaaattgcttcatccgttcatgcctttcctgacggaagaattatggcaaacaatttcacaacgaaacgttgaggatgctttaattattgcacagcagaaaaaggcggaaagttttaatgaagatattattaaaaacttcgaaactgctgcagaaattatttccggcgttagaaattaccgtcagacaaaaggaatttctccaagagaaggtgctgaaatttataccaatgcttcagaatttcctaacgaatccgtgattaagaaattggcgaatgtttcagaaattcatttcggaacaaaaacggataagccgagctttacatttttggtaggcgcaacagaaatttcaattccattaagtgaaaatttggatttgggagaagagaaaaccaaaacagaagaagaattaaaatacctgaaaggatttttgatctctgtagataaaaagctttccaacgaaaaatttgttgccaacgcaaaaccggaaattgttgaggttgaaaggaaaaaacaaaaagatgcgctagataaaatagccattcttgaagagaaattaaaaagtttataataaaaggtttaggttaaggttgagcctagagcttagcctgaaccttcatcttagtctaaatataacatgacacacatagaaaacatcaaaaaactgttctccaaaaacttcgtagaaagtccgttactggaaagctttgaagttgggaaaatttatctttccagcggaaaacttgttgcctgtgatcctctgattacaaatgatatgaagcctttctcaataccatttccgaaaggagattttgcagttcttctgcacaaggaaagagaaagcaattgtgtggcgtatgctgaaattattttcagccagtctgaaattacagactggaaactggcgacaacagaaggacagaatataaaagatcttacagagggagaggttttcggatatcccgtagaaagcggaatgggctgctttatggatgtggatacccagaatagtcttaacgatttggaacagagattgtatcgtaataaaggtgttgattttatggggatctatgaagaattttttcatgaatatttctttgatgaaaaaggagcaatcgatcagttcgcattcctaaaaccttcagaaaatcatccgggaactatttttgcatttgaaacaggatatggtgaaggtttttatgcaagttacatcgcctgcgataaaaatagcaatcctgtaaaaatcatcacagaatttattgaaattagttgatttttcattaattatttttgaaattcaaatttcaagtcataaatttgttagaatcacgaaatattaattctataagaaacactaatgaatttttcctcagaacagccaagaattatcgttgtaggaagctcttcgatagatcttgttttagaaaccgaaaaagttccctgtgagaacgagacggttattgcccgaaaatccgaaagttactttggtggaaaaggagccaatcaggcagttggtgcagcacgtttgggagccagtgtctactttgtaggctgtgttggaatggatccgcttggtcagcagattatgaggaatatggtgaatgagaacgtgaacgtaggtttcgtttttgagacggatcgtgaagccaccggaacagcttatgtaaccacttcgggcggaaataccgcaattgtggtagttcctgcagccaataattatcttagggtagaacacgttgaggcggcagataaatacttccatacagcagatctcgtacttcttcagcttgaagtctccatgaaggtaattgagtataccataaaaaaagccaagaaatatggtaaaaaagtaggattgtatgcttcacctgcacagcgtctgagcgatgaaattttaaatcatgtagatttcattgtggtaaaaagcaatgaacttcatattgttttcggagaagatcagagagaagacattcttaaaaaatactttaacaaagtttttgtaagagatgacattaattctaccatctattttgatggtacagaaatgaaatactgcagaaacgataaggataaaactgcgtataaaatgggaatgggcgatgcttttacggtaggattttctattgctctatgtcatagaaactctatagaagagtgtgtgaaatttgggaatgaagtttcggcaagagtttctgaatcaaaaggttcccaatgttgccttcccagactttcagattttatttcataagctatttgttacatatcgaaagttttaaacttaacataaaatataaagtaaaatttccacatttatagtggattttttctttttacccatgaaagagctaaagcttacagcatctgatgacgtttcaatagttgcccatttattttcgcctgaaaaaagcaatcgtaaactattgcttatcaattctgcaaccggagtaaaacagcagatttacttttcatttgcaaagtttttttccgaaaaaggatttaccgttattacctacgattatcggggaatcgggctttcgaaacctgaaaatatgagaggcttttatgcttccatgagaatctggggttccgaagattttaaagccgttacagattacatgcagaaaaattttacagattatcaaaagtactgtttaggacattccgtgggagctttaattttaggaatgaataaagatgctgaaatgtttgaagaatttttctttgtaggaacgcagaatgcttttgtaggacatttgaaattcaaaacaaaaatagaagcgtatttaggttttggaattgcccagcctttaaccaccgcattactgggctattttccgggaaattggttcggactcggagaaagtcttccgaaaaattgcgcatatgactggagaaccttaattttaaacagaaaatcgaccaacagattgctggagaaaattgaggattattctaaaaatttaacacagaaagtatttgtaatatatgctgaagatgatgcatggctcactgaaaaaggggtaaaaagtctgatgaacgatacctatccgaatcttaagccaacttacagagtggtgaaaatttcagaatcggaaaaaggagagatcggacacattaattttttcagaagttacaataagaaactgtggaatattattttaaatgaaatttcctgataaaagtttttttctttccgacactttggtcgcccaatatttaaaatgattgatataatgaagaatctgatcgaaaacacggtagaatttgtaaaagaaaaactggaaggtgcagaagcaggacacgactggtttcacatcgaaagagtatggaaattatccaaaaaaattgctgaaacagaaagctgcaatcaggaagttgtagaactggcggctttgcttcacgatattgccgatcccaaatttcataacggcgatgaaactcttgctttaaaagtctcccgcgattttctggaaagccagaatgccgaagaagaattaattgagcaggttttgttcattattaaaaatatttcctttaaaaacaggggagaagttcctcagaatcttcctgttgaactgaaaattgtgcaggatgcagaccggattgatgccatcggagccatcggaatcggaagaacattcaacttcggaggctttaaaaataatccgatgtatgatcccaatgtagagcccaaactcaatatgtctaaggaagaatataaaaaatccaacggaaccaccatcaaccatttttacgaaaaacttttgctgctgaaagatctgatgaatacagaaaaaggaaaggaaattgccggagaaagacacgattttatgctgaaattcctcgatcagttctacaaagaatggaatgttgaataggattcttttaaaagtctttaaataagtatctttgcactatggtatttattgttctggtcatcttctgggcttccgttttttctcttttgctttctaagctgaagaaagggaaaggcgcagaatgggcaaaattattccgtattgttacgattattttttcgttttctattttcacgtattggtttatcaagaaaagcacgataggcattgtagaaaattctgtggcattacaggtgattaataaacttccgcagcctctggatttttatgttcttacgcttaatgacacggaagtagggaaagttatcgatacgaaacatctgggaaccatccgtccggaatattacaggatagaatatctgaaaatggataaatctgatgaatattgggttgtggggtatttaggaaagaaaaatcttgtctatttctcccagaattctgtcccgaataagaatatcgatcagatgatagaagttcagaattacatcattcagagttcaaagctttccgatatggctaaaaaacagattgaagcctataatcatgaaaatgtaaagctcggaatctggatcactttagattttgtgctgctgtttctcaacatcatgctgcttctcagaaaaagaaaataaaaaaatcccaatctttactaaaggttgggattttgtattgcttttaaaagattaaggataatcaagaataatcatgattctttctttatgctcttcagggcagttcttaatcagcttatctttattgtgtttactgatttgtttcggttccagccattccgttacatcggaactcaaactgttgttgtcgtacgttctttttattttttcgtcttcataaaaagtatactcgtcaccgagccagttgctcgtaatacttattgtacaaatttccttttccatactgttattggtttttatttggctgattcattaatgaatctctacttcccaatttagtaattataacaatataaatgaaggatttacggtaattttttttacaggcgataaagtgaattatttatattaaaaatgcattttttgttgtcattatcccacttaatagtgaataaaattaaaatttattaaattctaaaataaacttcctgtactttcttttgccatttcggggatgtgaagatcctgtttccactcttcattcacttttttaataaaataagcggaaagcagcggagaagctttttcaatattctgatgtacaaaaaaatacagattctgaagtccttccttcttccatttgctgagatgcttcatccagtcatccagcctttcataatcactttctgcattggctccaacgtaacggataaacgcatttggtgtggtgagacgcatatgaagcatatctcttcttccggcagtatctacaataatgttggtgatgttgttttcttcaaacagatcgcaggtcttattaaggatctcttcatcggtaaaccattctgtatttctcagctcgatcgcgagaggaacttcctttggccagtttttcacgaatttttccagcctttcgtaatcttttggtttaaaattatcgtgaagctgaaggaaaaccattcccagtttttcatcaaaatttaaaaccgccgtagcaaactgcgtaacgacatcgtctacatttaaaagccttctgaaatgggaaactgtattggtgatttttggaaaaaatttaaaatcagcgggagttttctctttccatgtctgtacctgttccggagtcggcataccgtaaaaggtggcattcagctcaatagaattaaactgcgttgcataatacgtgagctcatcttttgtacctttaggataaaagcctttcaggtctgtcttgttccattttgcgcatccgatggagatattttccagtccgtttttattgcggcttaaaatttctttcgttcttggatggtctttaggtaatgtaaaatctatctttgaaggatcttcaacttgtccgaatttcatatctgaatatttttagaattaaaatgtataacaaatataaaacaaaaccacagaaattttctgtggtttgtctggttatataatttagttaaggtttactttaagccctgcgttaccattttattagaaactaccgaataaacacagccggttgactttaatgtaaccgtaatggttgcaggaaccgatctgtatgccgtgtcaccatacggctcaacaatattaccgttagaatcttttaaagttctgccttttacggtatacgtcattgttgccgttccggtaaatccgcttgaaggatagaatgttacaattcctgtattcttattatagctccatgttccctgtggggttacttttctgcggtataaagtaagatcggtatctcccgttttcgtaaaactgaatgtagttttatcgatattgtttttactccctgtaggcggagttgtaatactgatgggacctttgtaggcaatatcgttatccaaaaccgggattgaaaccggctgaagcttacaggttgttgccacatcatcattcgtaacagcggaataaggcaatgttaacttcacatttcggataatatgctgttgataagctgctccggttgatgccgcaaaaccaagttttaaaaccgcaggcactgcagcatttaaagtctggtttgtagccgcgccttcagcatccgagctgttaaaatctgttacggaaggatttgcattttcgctgtacggaacagaggttttgtaatgataataatcaataatattaatcggggttccgttttgtatggtctgaatatccacttttatatcaaatccatctgtggtggttgctgttacaaagtgaggaatcagatccaggtacacttttctgaattctccgcttccgtttctcagatcaaaagtagaagccaatgtattggtagtggaagcatacgatctgtccgcctgtaatattcttcctacggttcctgtattgcttaatgtagatcggcttaccagaaccggatatcctgtgtagccatctcctaagccattggtattgatggcggctcctttggctcctctcaatgttacgtggcttgatccctggctccatgttactcctgtaataccgttaactctggattcgccctgaaaacgttttgatttaaaatttccgaactcatccagcgcaatcccaagatatgctcctgataaaccgggttttctgaatgatgcaaaatcattttttgctctgttataagcatatcccaaacctgcaccggaagatccgattgtaggattggttacagaaccatcgtataggaaaaaagataaaccgtcaccatacgaaccactgaatggagcaccggatttcatatcgtattcaaattctacgtgtaaaccgtttaccgaagtaaaagttctgccgttgataaataatcctccgaactgacctgagcttgcaggggtaagctgtactcctgtggcagtatgggaagcatttccctgtatggtaagctcggatgccgaagaagcattcattaaagagcttgaataggaataaaatccgtaaatactggcaacttcagtactgtctgtctgtgcgtataggaaagttgtaagcaaagtaaatataaggctcatcaccgatagccctctgaaattctttttcatgatgtttacttattttacgacaaaaacaatgttaataaaagaagcaggtgtggcgtttgccagtacatcatagtttaaaactcctgtattgctgatgctgttaatcctgaacacagtagaatcgtatcctgttacataatagtgaagatctgttgcgttaggaaagaaaggaatcgttgccggagcggaagcacttctcgcattggaaggaatattcgaaaactgatttttatacaatgtgtataaatctttcgtttgtcctgctgcaatggtcgtcgtatcaaaaacaacacttggcatatagaaaaatcttgccgaatacggagaaagacacacccagtcgggagctgccggagttccgacattctggctgatacattttttattggtatcaaaaataaccaatcctgttgcgggattagtaaccaatgaaagattactgattctagggagtaaaagtccttttgaattactcgaaatgtctaaagaagaacttggatccggtaaagatgtattgatgccaacttgtgcggtaatactgtaagaaagaattaccaaaattagagtgataattttgtgcattttagaaataatttttttgtgttcataccattgataagctttttaccaatagctattatttgattaaggtttctgtgtgtttttttattttgtaaacaaattcatttgtacttatttacagttataatttttcattttggggttaaaattatgaatagagtgttgtgtttttttatttataaaataatatttatcttatgatttaaaatagaagtttactctccgatgttatatttttaatgatagaaactttatgactgatcattaaaaatattcgcaaagatactaaaattttattttaaaaaataatcaaagtacagagatacagtaatttgattcaccaattggggattgaaaatgaattattttcaatgtttacagatgattacgatgggatatatatttttacattcgaatgttaaaattatattaaaatttttacaggtttaaaaggttcattttatagcttatgcaaaaatggatgtatttcttctttagccttattattttctaagctaaaatgttgcgtaatctactgtcctaaataaacaaaaatataggcagataaatattttggctgaagattaagcggtgtgccggatcctcctgtaaaaaccgagaatgtatgggtatgtgctcctgccgatgaggtggtagaagtagtagaatcattatccacaaccgttttggtacttcctgcctcaacactgtttaccgttccgctggctctgtcgttataagtgtggttatgagctccggtgcttgaagttgttgcattataagtaacattcggaaggtttgcctgtgtaagtacaactgaagtgtttccacccgcggctcctaatgtttcagaagctgattttgctttcagatatctgtctgcactgttgggaagtgatgatgaaaaacctaataatgatgcagcagattgcgcagaaacagataaggtagaaattgctcttccgtccagaagataccatccgtcatgatcggttgccacactgctgtattttatatctcctacagtaggagtctgtacttccattttattccatgacgttccgtcattgtaataaattcccggggttacacttgtaagagtggttgctgtggaagtattggtgttataaactgtcattcctgcaatatgacccggtaacggactcggattgtctgttgttaccagtgagactttcggcatcaaaagacctttattgttattttgagaataaagttcaagctgtgcattgggattcggggttggattgccggaggttccgttggtgattaaaacctgggcatcagaagaagaagcgacagaagtcagtatgacaacgaaaattaattttttcattatttaaaattatttgtgttattttccgagataaataaaatactgtacaaccaaatgttttggatattgcgtgatcgccgtattcgttccaccactcgcaacagaaatagtatgactgtgatctcctgcggctgcggtagtccttgtttccgtatcaattgttcttgtagtattgatgcttcccgcattatagttccagtagttgactcctcgattggtatagctgtgagtatgcgctcctgaagatgccgtagttcctgtaatatttacattgggaagattagcctgtgcaatggaataagaattgcttcctcccgttgcagcgatggcttcggatgcatttttgccctttaaaattcggtcatttgaactcggaagggtagcgctgaagcctaaagcgaccgcattggtctggcttactgccggtaaagtagaaacagtacgtccgttcagcagataccatccgtcatgatctgcagttgccatgctggattttatatctcctactttaggaagatcattgttgatagacatcagtacccactttgttccgtcgttgtaatataatccggggattacattattgggagctgttccggcagttgctgtattgtaaacccacattccttctacattgcttccaaaagggatagcagaggttgttgatgttaaggctacgctattcataagaagacctttattggtactgctcagctctaaaacagcagagttggaaggattatttattcctattccaacttgtgctttgtgggcagtaaaaaaaaataatgcgatataagggtataaaaatttagctttcatattaacttcctagataaataaatacattagtaacgatgttgcttggctgtaaagctacaggctggctgcttcccagcgtaaaacttaatgtgtgggtatgattgccatctgtggtcgtggtatcatttacactggaattatcagaaatcggattgttggttcctgatacgacaccgtttgttgtagaatttaaaggattgtctgtatacgtatgcgtatgatttcctgtagtattggttactcctgtgaaattcacattgggtaaattagcctgcgttaaagtaaaagtatcgcttcctgatgccgctgcaagattgtctgttccgcttgtgtttttaagaaaacgatccgtagcatcaggcagattgacagtaaagcctaaagcagttgctcttgctctgggattggcagataaagtacttatcgctcttccgttaagaagataccatcccttatgatcagcggtttgaaatccgtttttaatgtctcctactttgggtgtttttgtggataattttacccagcctgttcctgtattgtaatataatccgggagtaacgttgttaggagaagttcctgccgttgcggtgttgtacacaatcattcccgaaacatgagcactcatcggagccgctaatgtggtggactgaagagcaattctggtaagcaggaaacctttgttgttggatgaattttcaagctgtaaaatactttcagaattaactgctccggaggaatttgaaatttttacctgagcattagactgaaaagaagtgaatagaattaatacaataataccattcgctttaaaatatttcctcatagcatttgtttgaaataatttttgtgttattttttacaaatgtatgaaaaaaatatattttactgtcaattgaaaatcaacgctgtaatcaggaatatttatttataaagaatagtctttacatatttcctttattcatggcagattgtacagcatattttataacagatcatgaaattaatacaatattaattttttcttaacataaaaaagcacgcttaaaaaagcgtgcgggtgaatatgtaatgtttattatttgagaatcttatgcttcacaagcggtgcaggtaacaaagtttaccatcatttctttagaaacagaagaacttctttgataataaagggtttttacgccttttttccatgcttcgatataaagatagttcacatcttttaccggcattgtagaagggatctgcagattcagagactgcgcctgatcaatgtattgttgtctttgggctgcctgagaaataatctccatcggagaaatttccttgaatgttttaaacactgctttctcttcatccgttaactccttcaaatgttgtaccgaaccgtgattcaacatgatcgttctccacgtttcttcgttatcaagccctttttcctccagtaattttgcaagatatttattcttacgcatgaagtttcctttcgcaagacctgctttataataattcgaagcaaacggctcaattcccggagaagtctgtcctaaaatcgctgaacttgacgttgtaggagcaattgccatggttgtcgtattcctcaatccgtaacctttcagcagttccggctctccgtaaatattggcaagctctcttgaagcctgttccgcctgttctttgattcttctgaacgctcttgcattgaattgtgtagcctcaaaactttcaaaaggaatcatgtttttctgaaggtaagaatgatatcctaaaactcctaaaccaagcgctctgtgacgcattgcgaagtttcttgcaccctgaagataatagtttccttccgttttgtcgataaattcagataaaacagcatcaaggaagtagattgctaatttcacggcgtctgtatctttccactcatcatataattctaagttcatggaagataaacagcagatgaaagattcttctcttgtagaaggaagcatgatttcagaacaaaggttacttgcattcacaggtaatcctaaatctttgtaaacctgtggcttatttctgttcacgttatccgtaaagaaaatataaggaagccctttttgctgacggctttccagtactcttgcccagactttacgtttttccatatcgccatcgatcatatcctgcatccagtaatccggaacacaaactcccgtaaataaattctggatcggacttccgatgtctttgatggataaaaattcttcaatatctccgtggtcgatatctaagtaagctgcaaaagcgcctcttcttacgccaccctgagaaacaacgtccattgccgtatcaaaaagtttcatgaaagaaaccgctcccgaagattttccgttgtcggtaaccgcagttcctctgttacgaagctccccgaaatatcccgaagttccgcccccgattttggtctgcatgataacttcgcccattttgtgggtaattccctcaatgctgtccggaatgtgaacattgaaacacgaaataggaagacctctctgtgttcccatatttgcccaaactggcgatgagaaactgatccatcctttggtgatcatttccttgaaagcaggctgaagttccggcttgtataatcttttggcagcagcagtggtaatcctgtcgatggctccgtctacagtttcaccctttagcaaataacctctgttcagcatttgctcagactcttcattgagccaccatatgttgttgttttgttcttccattgttgttgtatattttcgaattcccgagcggtttgaaggctcaggaattttgttttatttaattatttgtcattgcgaggaacgaagcaatctcttcattaattttcgtcttaaactattcttaattactttaaattttaaccatttaagattttggtttaaaataatgttaaggaattattgtttttgagatgcttcgacaggctcagcatgacaccgctaatactatctgtttcgacgctcgcttcgctcgcgcttttttaatttaaaatttaaaacaaatcgttcgcagtaatactcttatcgtgctttgtataatctaccggtctttttgcaaagaaatcatccatagaattggcgaaaacttcctcttcgaaccaaaccataggtctgtactgttccggagttacgttgtatcttgttttcatgttgattttctttaaactgtcgtctacacggtatttcatgaaatttaataaatcttctttagaaacattgtcgatttcgcctagttcaaagatccagcttaaaatatcaccttctctttcgatcgattcatcaaccaaagtataaatatcttcgatatcgctgtctgttaaaagatcaggctgttcttctctgattttgttgattaggaaaattcctgcattggcgtggatctgctcatctacggaagtccatgcgatgatgttggaaacatttttcataaaccctttaaatcttgtgaaagaaaggatgattgcaaattgtgagaaaagagaaacgttttctaccagaatactgaaaagcaacaatgcagaaacatattctttcggcgttgcagaattcgcgtgtcttagggcatttcctaaaaattcaattctgctttttacggcaggaatttccactacgttaaggaactcatcgttatatcccaaaacttccaataatcgggaatatgcttccgagtgacggaattcgcattctgcaaaagtcgctcccaaaccattcagctcaggctttggaaggtgagtgtacagatttccccagaatgtctttacagacacctcaatctgtgcaatggctaaaagtgcattttttacagcgtgtttttcgtgcggctccaactgcgaatgaaaatcctgaacatctgcagtaaagtccacttcggaatgcacccagaacgatttgttgattgcctctacaaattgaagaacctcagggtattcaaatggcttgtaacttactcttttatcaaaaattcccatattaaaaatgtcttaaaaaattaaaataaatagatcaatgtggataacgttcaaaaaaataatcaatattctgatttggtgtaacttatgtgtgaaagttattaaccacggaagcgatttattttttgatctgtgcaagtacaaagttcgaaaaaaagaactgtaataaaaagggcgaaacactaattcattgagttttagccttaaaagttttccacatttacatgaaagccccttaaatattgacttacaaagtattatgttaacaaaaacgtgattataggcagaatttaattaaacaaaaaaataaaaagtgctttgaataaagagtttatctgttaaacaattaattaaataaagattttttcaatattcgtaacaaattaaaaattctgtctacttattgggtataaaaaacatacaccgcttaatgttagtaattcaggatttacataaatcatacgataccggaaaaagtaagctgcacgttctcaaggggattaatcttacgatttccgaaggcgaatttgtatccatcatgggaagctcgggttcaggaaaatccacccttcttaatattattggtattctcgatgaaaaagattccggaacgtatgagctggacggagttcctattgaacatctgtctgaagtaaaagctgccgagtacagaagtaagtttctgggatttatttttcagtctttcaatcttatcggctacaaaacagctttggataatgtcgcgcttccgttgtattatcagaatgttccgcgaaaagagcgaaatcagaaagcgatggaatatctggaaaaagtaggactcgctcagtgggcaaatcatttaccgaacgaactttccggaggacagaaacagagagttgccatcgcaagagctttaattaccgatccgaaagtggttcttgccgatgaacccaccggagcactggattccaaaaccacgcatgacattatgaagctgcttcaggatatcaacagcgaaggaaaaaccatcattgttgttacccatgaacctgatgtggcagcgcagacaaaaagaaatgttgttctccgcgacggaattattgaaagtgatgagtttattaagcagttggtgctgtgaggcaggaggctggaagaaagaagtttaattaatagaataaatcagcggaaaggcggaagaacctcaatcatcccgcttcccgcttcaaacctaagaatatgttcgatttagatcgttggcaggaaatattcagttctattcgcagtaatgtattgcgaacggtactttccggttttactgtggctttgggattatttattttcattgtccttttcggaatcggaacagggctccaaaatgcttttacacagggttttgcaagagacgcccaaaatcttatttctattgtaacaggaaaaacgacgattgcttacaacggtctgcagtccgatcgtaccgttacgatgaataatgatgattacgattttctggtgaatattgataaagaaaaggtaggaagttctactccgagatacacctcaaatttactggtgaaatatggcaaggaaagcggaaattatcagattaacggagccaaacccgaagagcagatcatcgaaaacagaaaaatgctggaaggccgctatctcactccgaccgatctggaaagaaaacagaacgttgccgtaataggaagaatggtgcagcgcgaccttataaaaaacggaaatccggtaggaaaagaattggatatcaacggaaccatatttaaagtagtcggagtattttcggatgacggaggagactgggatgaaagacatattacagtcccgatcaccactttgcagcaaatgaagaaaggttcggatactgtaagcatcaattatattgcatacaacgacaaattaacaccggaacaggcaattaaatatggtgatgaattaaaatcaagactgaaagcccgaaaaaatgtagcgcctgatgacgaaaacggaatcagagtctggaacaacgcccagaatatgaacgacacttttgctttcatggcagtacttacaggaattgtcggtttcatcggattgggaactttggcagcaggaattatcgggattagtaacatcatggtgtacattgtaaaagaaagaaccaaagaaatcggagtccgtaaggcgattggcgcaaaaccaaaaagcattgtcgcgcttatcgttcaggaaagtgtggtgattaccgtaatttcaggattgataggagtgggactcggcgttctggctttatatttaatcggggataatctggaagcatacttcattaaaaatccaagtgtaggatggggacacatcatagccgcattcattgcactggtgttttcaggactgattgcaggatttgttcccgcgtacagagcctcaaaaattaagcctattgaagcattgagaacagaatagcgaaaaaaagcgaatggtgaattttgtttagccagtgaatttagctattgagattattaaaagaaacagacattaacaaatgaacattatatttaaaaaagatacttggcaggaaatttattattccttgagaaataataagcttcgtaccttccttaccatgattggagtaggttggggtatgtttttgtatgttagtttgctgggtgctgcaaaaggaatggaaaatggtttcgataagctgttttcaggttttgccaccaattctattttcctttgggcgcagaatacctccattccttatgacggtttcccgaaaggaagacagatgcacctaaaactttcggatatcgacattttaaaaagaaaaatcacagatatagattatatatcgcctcagaattcaagaggaagctttaccggaacacccggagaattaatgtccagaaacggaaaaagcggaacctattctttaacaggagattatcctgtaggaaataaaatttcagaaaagaaactgattttcggaaggtatctcaacgacgccgatgtttccggaaataaaaatgtggccgttatcggagaagaaatttacaagaactttttcgattctaaaaagaacgaaaatcctttgggaaaatccattaatataaaaggaattttcttcaatgtgatcggagtattcagaatcaagaaaaacggaggttttgaaaatgaccgttcggttttcataccgttatccacctacacaaaaatgtacaatgcggcggataatatcgatatgttcgcaattgtaagcaagcccaatgtagatgtaaattcagtagaggaaaaagtaaaacaggagcttaaatccaaaaataaagtttcgccggatgataccaatgctttcggaagttttaatttaggtaaagaatttaaaaaactgacgggttttttatccggaatgcagttgttaaccattattgtgggaactttaaccattcttgccggagttattgccatttccaacattcttttaattacggtaaaagaaagaaccaaagaaatcgggatccgaagagctttaggagcaaaaccttcagaagtaagaaaccagattcttctggaaagcgttgtcattacactctcttccgggttgctcggctttattttcgggatttttgttctgatgattctcgatattgccacaaaaggacaggattccttcccgttctacaatcctacagttaactatggaaacgtatttgctgcaatggcagtgatggtggttttaggattaattatcggaatgattcccgcacagagagctgttaaaatcagaccaattgaagctttaagaactgaataaaataatttaaataaaaaaataaactatatatgaaaaagaaattcacttggaaaaaagccatttatatcattttggggcttttgtttgcagtggcgctgttctcggggatcgggtatcttgtaaagtccaattctaaagagagtgaggctttccttaccagaaaaccgtctgttcagaatatggaggataaagtgatggcaacaggaaaaatcgttcctaaagaagaaattgaaatcaagccgaatattgccggaattatagataaaattttggtagacgaaggagataaagtggaagtggggcagttaattgcaaccgtaagaatcgttccgaatctttccgaggtaaataatgcgcagcaaaatgttaataatcagcagcttcagatcagcaatgcaaaactgaatgtagataatatgcgcaaacagttcgaaatgcaggaaagactttacaagcagggagtcgcttccaaacaggaatttctcaatgcacagcaacagttgtattctacacaacaggctttaagaaacgcacagcagcaattggtgacagctcagaaagctttacagatcgcaaaaacgggttctactcctgaattacagggtttggcaacaacgcagatccgttcaaaagcttcaggaactgttcttgaagtacctgtaaaagtgggaagtcaggttattgaagccaactctttcaacgccggaactaccatctgttctattgcagatctgaactctttgatctttcagggagaaattgatgaagctcaggctggaaaattaaagcaggggatggatatgaatatcgttatcggtgcgcttcagaacaaaacctttccgggaagattaaccatgatcgctccaaaaggaaaagataataacggaaccattaaatttcctgttgaaggagatgttttcaatccgaataatgaatatatcagagcaggattttctgccaacggagaaatcgttctgaactcccagaaaaatgccttgcttttggatgaatctttagtacagtacgaaaagaaaaacggaaaagaccttcctttcgttgaggtgaagcagaaagacggtaaattcaagaaagcgtatgtgaagttgggagcaagtgacggaatcaatgttcagatattatccggaattgataaaaatgcagacgtaaaagtttggaatccttccgataaagacaaagaagagctaaaagaaaaagcgaaaaaatagtaaactgacactataaatttttaaactgtaaatcccaggaaactttctcgggattttttattattacctatatataaataacccgtagtgcatttgtgctatattgagtaaaagttgtgcaagctgctaaaaagcagtaaattgtagttaccacacaaacaattaaatgcacaactttagagcaaattacgagaaaattttagaagtattaaagaaattagaattagatagtgagaattttttatttcagatacgaaaacccaagttaacagatttaaggataatcgccatcaatctgacttctgaatatatgagtattgatattgagcatcagctttttagaatcttacctgttgaaattaaatctcttatcgaacgaagtgtttacaacagaagaaaaaggaaactgtttaaccatatggaaaggattagaaaattattagcggaaaggtttaatggctctgaaaagtattttgtggtagacagtatgccattggaagtgtgcaaattatcaaggagttcacggagtagaatatgtaaagaaacagattatgcgcttccaaacagagggtattgcgcatcacagaaaatgcattactatggttataaacttcatgcagtttgttcagcagaaggtgtatttcaaaatctggatattagccctgcttcagtgcatgatattcattatctgaaagatataaagcaacaagttgaaaactgtacaatcttgggtgataaaggttatttgtctgcagagtatcaattagacttgtttacatcgcataatataaaactggaagttccaatgagaaagaaccaaaaaaattataaaattcagccttacataatacgcaagtccagaaagaggatagaaactttattctctcaactttgtgaccagtttatgattagaaggaattacgccaaaagttttttaggttttaaaacaaggatactttcaaaaatagtaacgctcactattattcaaacaataaacagaaatgcaaataggaatatcaataatttaaaaatcaatattgcctaaatgcactacgagtataaatataaagtcactatcatctataaattttaagcatagctaaagtcagtctgatgtatgatgcatttatataatacgtatttttctccattttacacttgtgataatgccttaggttaaaattttaaacattagtttaaaaagtataaaattattctctcatcatatcagcgttttatgtccaaatatgaattaaaaatgaaattaaagttaacaaaacttgttttgcgttacaataagttgttatctttgccccactgaaaacgagagttgatcagtaagcgcagaagagcttttagataagcatataatttacgattcctgaaaagatgcgatacgtcttttttaagagattctgatattttccttcattattttaaaataaaaaaaacttaaaataaaacttgcgggaataaaaaagatcagtatctttgcagtccctaaacggggaagcgcaggagcggatgataaaggtttagataggagttaaggttacagaaaaaactttaaaatttctttcaaaacatttggtcagatgaaaataaattattacttttgcactcgcaaatacgaaacaagaacgacagatactgagtttcgtaggaagcggaagaaatgaagatcattgacatacaatannnnnnnnnnnnnnnnnnnnnnnnnnnnnnnnnnnnnnnnnnnnnnnnnnnnnnnnnnnnnnnnnnnnnnnnnnnnnnnnnnnnnnnnnnnnnnnnnnnngctcagagcactatgctttcagtatggaatgatcccgaactttgccagaaataaaagaagcaaaacaatagaagatgatatctacttcgatccggaactttacaaagaaagatactctattgaaaggacaaacgcttggctggacagcttcagatcactcctgaacagatatgacacaactgtgatcagttggaagctttaaattatatcgcgtttattgtgattggactgaagaaaagtaaaaagtttaaatgagctcaatattaatttttattctattttatattttgttatatattttccagaaagtaatagtataaatattccccaactttccgtacaaattttcaatcgttctacccacccggaaactatttccatattaattgctaatcgatagtcttcttcatcacctttaggttcagggaagatataatccctgatactgagcatcgctttaaaatactcttgctcttcttcactatctatgtaagtgtcttcatcaaatgggaacatatttgtccaatcgaataaagaatctaatattgtttggaaagattgctgtagctctaaaccgaccttattcaaatgttgttgcagagtatttttatcagattctgaaagttcaatttcatcaaataacctcaaatcatagaaatggtcaaccaagaaaagtagttttccatacgcttcgcctgctttattaatttcattaaattccggatataattgcgcccaactatctatatttagttttttacgaatatcttcttctacaggtttcgtaattgcattaataacagataagtcttcaaatgttttatcttttagcatataaagccttacctcattccaatgattgtttagggttttattcagaactgtttgaatgaaataaaagtttgaaaaacctatttgtaacatcaaatactttaggcttgtatattccggattatcaatggctttatgaagaatattataagcttccttaaatcccattaatgaccaaaacggactttgaccatcaattattacgattggcttatcggctgtagttttattattgacatattttattgtaaagcaatcagctttagaggcttgtttaaattcctttattattctattttcaaaatcagactttaattttagtactcgattgaatgaacgttctcctttattgttgtcgttcaaaaaatctttccaaatgacagctgtagtaagtaatgaatttacttccactttagaattatgtttagtattaatgtttcctaaaacatttttatattgagtattatattcagcaagtttatctattgcatcataaaggttagtttgcgataatcgctcaatattttcatcgtgaatatgcccttcttcagtttttaattgaatttttgagtaaagtgtttttgcggattgttgaagaaaaatttctacgcttcctttgaagtcagaaagactcttaaaataacgctcgtattttgattgtaactttttgttcagttgctctcttgggttgttggatgtcgaatttttcttttttccgccatatattcctaaagaatcagttatcaattttggttctttaactttttcaggcattttaaaaaaggcattatgcataacaggaactacaggtgtatatgttttactgcctgcaaagagttttgcaaatgaactattaaactcgtttaccttttgtttaattagattttcccattgattgagttgaactaaatattctttccaatcggctggtctatcttcataatcgtaaagcttggtcatagaagcgttaatatttacccattcttccaaaggcatattttcaattggcattgttttgtgggttgaatcataatcgactgctaaggtttgcagacgatgaccatatccttgagaattgaacttcttcttctctggcaaagctgttcttataatgtctaaaatattaacaacaaaatcattgcttgaccttaattctgtattttttagaatatcaataatgaaatgaatagttatttcttctccattaaaatcgaaatgtacaatatcaaattcttcctttattttctttacaaaatgttctacatatttctttcttatagtatccagttcagtcgaataagaatacatacctaacattaatttagataagcttttactgtccattatttgaaaagctttttcaaacttttcttcttcataaatttctacagtttgtttatcatttggaatattttttagccaaaataaagactctccaaaagatttccattcaagtattgtagaaggtagtttacttggaaaagtaagtttatttaatactctcgtcgctaaattgaaaacggtttctttcggagttagattttcatttatttgatctatcttttttctatgctcatcatctacattaaacacatcaagcaatccatttttatcatagtcaacaccgaacttaaagtcaacgaagaaataccaagctccaccatacagtgctctgcattcatccaaaactttttgattattctgcacatattgttttgtgccaagccatataaaggcttttataaatgatgcgtacgtagcccagttttctacagaaatatcttcatttaatttttgaatgaatttgtctgattttaaaatatcaagattgaatagctgtaatagaaaaagatacaaatcttcttcagctaataatgctattgttttgtaagcgtagtcttctttatgattaataaattcatcaaataagatttccgtcaacttttgcgagcgtactatatgcaaaccttgaatgtattttcggtcagaagattttttaatcagatattcattttctaatttttcaattataaattgatagtcaatatttgaactcaattttgaagcatcaatcttcgaacctacagaatcagctagacttacaattcttaagaactcaatttgttgactggcattttgattgttttcttgctgtatttgtaaaatctgttgctttaatttattgaataaggagtctccttgtgtaatggaataaacaaattctaataatggagcatcatcgcctaactgaatccaagcttgctcaaaatcagtaaaatggtttatttggtttctttcgtttagctttaagtaaatgatttctgcttcttctttggtgagtgataagtctatttctttgtattcaaaatcaatacctatggcagaagctctgtaccaatcttcattccttacagcaacaagaaacttgatatgctttagatgtgaagattctttaattattttaacccattcagtagtattgggtgtaacgtttattacaaaaactgtggggatatccagcttcctgcttatagatgcaatcgcttgaattgactgttgagtaactatagggtcttcctgaatattaagttcaaaagaaagccaatgattaatatatttatgaacataactatataacaatgctgtttttccttgtccagatgcacctttaatcattacagcattatttgtttgtagctcttcgttaattttctctaaattcttttctctattaacatcaagtcccaataaaatatgttcataccttgttaatgtcgcattgtagaattcttgctctagctgctgacgatttacatcgtccgttgaaattttatgtaatggttttagaaccaagccatattgattgtgaatagcaatcctctcacttagatatttagcaaagtcctgaactttgttatagaaatctttttttgtaattggctgttgtttttctgcaataaactgtagccaatacaacaaatatccgatggttgggatagggtcaatctctgtaaagttatccttcattaattgctcaacttcgtctgtaattatctcttcgttaatttctgaaaattgtgttttgttcttaactattttccaatcatctgaagttattttatacctctttaaattagatttttctttttcgctaatgctattcttatggtcattccaatttttaagatcttcacttatttttccataagatacaagtattggtgttgcagaacagtagttatccaagaatcttttaatgaatgaagttttactgtctgaaagaatgtcagacaatgtgataggctttcctaagttttttagctgtattgcatacagaagtttaccactgttgtctaacacgtccaaatcctcttctccttctaatctgtatataaaatcatctgataaggtagataagatataatgcaatgaatataggaattgggttctataacctttaagagctgaaattgctgacataagcgtttttaatctaaaaaaataacaaattactgttaaagctaatttatcaaatataataactctctaataaactacattatggattaacgtaaattaaatcattaaattaattaaaaaagttatttttaattatctttttctttatttcttcatccgtgtgattattcagaattttagcatacgtaaaatgttgtcctagtcaatccaaacggtttataaatttcttccggacgcttcgttatatccttatatattgcaaaatcagtagcacagatcacttgtttcggtttgaatagaccaccagtttaaaataaattggtttttgaatagtctctgtattattgagaaagtaatggtcagttcgaaccgaaattgcatgataaaccagatatataccttgtacaagggagagaagttgatacaaggaacagccaatgataaaaagattttagaattttaccgaaaactgaagaagaaaatttctagcaaatttgaaaaattagaaaggttcttgaggaaacgtctcgctaaaattgacaatattttactcctttttatttttgactttagaaatgaaactatccggtagtatctcgctaaagtgtaagttattacattcttatattatacagtagatttaacgattttcgcactaactttgcagtatttcgcatttactttaataattcgcatttactttacaaattcacacgccgccaactaaagcgacatccgatatcgtatgatgtggagatcgaaaaggacgaaccgtcatgagtgacgtttccgtacccatctttccggctacggaatgaatcttggttgtttccagcgcttcctttaaagttaaaggcggtaaaatactcggaactctcttggcaagcattgtttttccgcttccgggtggtccgatcaggatgatgttgtgtcctcccgctgcggcaacttccatcgccctttttgcagcctcctgtcctttcacttcagaaaaatcaaaagggaaatcgttaatcttttcctgaaattctttccgcgtatccacttcgatttttgggagtggttttccttcattaaaaaagtcaataacttctttgatattttcggcggcaaaaacatcaagactgttaacaattgctgcttcccgtgtattttgttttggtaaaataattcctttaaaaccttcttcacgagcctgaatcgcaatgggaagaaccccttttataggctgtaaagttccgtctagagaaagttcccccataatcacatactcctgaatattttcggcaacaatctgatctgaagcggcaagaattccgatggcaatactcaggtcataagcggcgccttcctttctgaggtctgcaggagccatattgatggtaattttctttccgggaatcttaaagccgacgtttttcagagcagcagaaattctataactactttctttgatagcgttatccggaagcccgacaagatgataaccaactccgcctgtatctacatttacttctatcgtaatggtttgtgcagccacaccgtgaatggcacttccatagactttaatcagcattttttatgtgtttgccgtaaatgtagaaaaatttttaaataatgattttcttaaaagaatttacctgaatatttaaaaaataaaatgagattcactgaaatgatccattcctgatgtagattttctatgaatttattaatccgttgaaaaaaaataacttatgtgatgtaaatttttaagagtaaaaaaaataaaagctgttccaaaagtgaaacagccttcgtattaatcaattatatattgttaaaactctatatcaacctgaagcttctcggcaagaagttttgaaattttttcttttaatggctcaatgtcaatattttgcatagcatcgtttgcaaaagcatataacagtaacgcctgagcttcttttttagaaatccctcttgctctcagataaaataacgcatcttcattcaattgtcctactgtacagccgtgagaacattttacatcgtctgcaaaaatttcaagctgaggttttgtatcaatcgttgctccttcgcttagtaaaacgttgttgttttgctgataagcattcgttttctgggcaattttatcaacgaaaacctttccgttgaaaaccccgtgagattttccgtcaaaaatacctttgtaattctggtaactttcgcaattcggctgattgtggtgaaccgccgtgtgatgatctaccaactgatctttcccgataatggtaattccgttcataaatgaattgatattcgatccgttttgaatgaaatccaggttgtttcttaccagcttacctccgaaagagaatgtatttacagtcgttaagctgtctttttcctgttttgcgaaagtattgtcaatcagataagaagtatcgttatcgttctgaactttatgccagtccgcttttgcgttcggataggtgaaaatttccgtaacagaatttgttaacacatacgtgctgtcaaaattatgatgactttcaataatttccactttggcgccctcttctacaattaaaaggtttctcgtattgtagaacgtgttttcttcctgattctgagaaatgtaaaaaacatgaatcggtttttcaatcactacatttttcggaactttaagaaagaaaccgtatttgcagtatgcctgatttaaattcgtgaaagcagattgatcttcagcaattgtgttgaaatatttctcgaaaacatctctgtgtttctcatcattcagcgcataattgaatgaaagaaactcaacattttcaatggaaactttagataactctttatgaagtttaccgttcacgaaagtaatccagtcgaaattttcttcgcctaaatgaagctgatccaactgctctttggtgatgttgtgactttctttcgggaaaaaattgtaattcttctcggtaatttcctttaggttggtatatttgtattcttcgtcctttttagtaggaaaaccagctttttcgaatctctcaagagctgctttacggtcttcatccagaaatctgtgacgaaggctctccaaaaattcattatggttttgtatgatctgttcttttaatgccattactggtatatctgtggtttgcaccattttttctttttttgtttggctgaaattgttaaactaagagatcagataaaatctctgaattttttaatcttttaattaatttaaaagccagtcgtaccctttttcttcaagctctaacgcaagagatttatcaccggttttgatgatttttccgttggctaaaacgtgaacaaaatcaggctgaatatagttcagcaatctctgatagtgggtaatcagaagaactgcatttccttcgtttttgaaagcatttacaccatctgcaacaattcttaacgcatcaatgtccaatcctgaatcggtttcatccaaaatagccagtttcggatccagcatcatcatctggaaaatttcgtttcttttcttttcacctccggaaaacccttcgtttaaagatcttgaaaggaaatcttttttaatacctaatttttcagatttctcacgaatcattgccaacatctcttttgccggcatttctcccaacccgttagcttttctgttttcgttcatcgctgctttgatgaagttggttacagaaacgcccggaatttctaccggatactggaaagaaaggaaaattcctttgtgggctctttcttcaggagcatcttcgatgatgttttcacctccgaaaataatttctccgtcagtcacttcataatcttcttttcctgcgataacagaagaaagcgtagattttccggctccgttcggtcccataatggcgtgaacttcacccggctttatttcaagattaattccttttaaaatttctttgtcgccgtcttcaattttggcgtgcaagttttttatctctaacatacgtttaaatttatcgcaaggctagactaagatttttaatctccctttgcttttataagataaacaaaggcgctaacgcttatcaatgaaatactatttctttttattttaaacattaagaatttaaacaaatctttaatgcgttgttttgtcatttcgacgaaggagaaatctattttaacttagattcttcactccgctttgcttctttcagaatgacaaacaatgtgtcaaacttaaggatagacattatcccacagaaccttccagagaaatctccagtaatttctgggcttcaatggcaaattccattggcagtttatttaaaacctctttgctgaaaccgtttacaatcagagcaatagctctttctgtatcaattcctctctggttacagtagaaaatctggtcttccccaatttttgaagtcgttgcttcatgctccagttgtgcagtcggatctttaatttcaatatacgggaaagtatgagctccgcattcattccccatcagtaaagaatcgcactgagagaaatttctagctccttttgcagaaggcattacttttaccagacctctgtatgaattattggattttcctgcggaaatacctttggaaatgatggtagatttggtattcttaccgatgtgaatcattttggttcctgtatctgcatactgatgattgttcgttaccgcgatagagtagaactcaccgatggaatgatctcctttcagaatacaagacggatatttccatgttaccgcagaaccggtttcaacctgagtccatgagatttttgcatttctttcgcaaagtcctcttttcgttacgaaattgaaaacccctccttttccttcttcatttccgggataccagttttgtacagtggaatatttaatttcggcatcatccattgcgatcagctcaacaaccgctgcgtgaagctgattttcatctcttgacggtgctgtacagccttcaaggtaagaaacataacttccttcatccgcaatcacaagtgttctttcaaactgacctgttcctgcctgattgattctgaaatacgtagacaattccatcggacatcttacgcctttcggaatgtagcagaagcttccgtcagaaaatactgcggaatttaaagctgcatagaaattatctcctctcggaactacttttccaagatattttcttactaaatcaggatgatttttgatcgcttctgaaatggagcagaaaataattcctttttccattaacgtgtcctgaaacgtagtttttacagaaacggaatccattacaatatctaccgcaactcctgaaagtcttttctgttcttcgatattgattcctaatttttcgaaagtttttagcaattcaggatctacttcgtccagactttccagctcaggttttacttttggcgcggcataatatttaatcgcctgaaaatcaggtttttcatatttaatatttgcccagtccggctccgtcattttctgccagattctgaacgattccagacgccattccgtcatccattccggctcttcttttttagcagaaattgcacggacgatgtcttcatttaaacccgttgggaaatcttcgtaatcgatttttgtttcccagccgaattcgtattttttattttccagatcgactcttagatcgtcttcagtatatttattcattatttttttttaagattttagaagacagatttcagatctgatttttttatccaaatctgaaatctgcatccaatgtctttttttacaaagaaaaactctcaccgcatccgcaagttctggatgcattcggattgttaaaaacaaatccttttccgtttaaacctcccgaatactcaagaatggttcctgctaaatagaggattgattttttatctacaataattttgatatcattgtcttcaaaaatctggtcggtatctgttttttcgttgtcaaacttaagaacatattctaaaccagagcatcctccgcttttcaccccaactcttatatagtcttcaaaaggcttaaaaccgtcctctgtcatcagctgaatggcttttgcttttgcttgatctgatacttttatcattgtatttatttagaatgatttaatgatgcaaaaatacgaactaatttccgcaatctcaaatcgaagatatctattttgatgattctgttcttaatagatgtatttcagtgatgaattttctgttaaaaatatttaaattttcttaatagacgtcgtaaagcctgtttttgatttaactttgatcgggattttaaatctataaataaaacaaagatttcaccctttttttgtgtagtctttaaaattacagtttacaataaaaatatactataaatgaaaaaattaggcattcttgctttggctttgttcatgcagacggcttttgcacagaccaacagatttgtatatcaggttacgatgaaacccgatgcgtccaataaaacagatacgaaaacagaaaatgcgtatctggacatttctccggaaaaatctgttttttattccgaaaacagaattaaaagagattctgtcattcaggctgccatgcaaagtggaggggcaagaggtttcaacagggatcagatggaagctttacgatccaacatcaattattctgttgaaaaagataagaaaagccagaaaatgacattcaaagaccgaatcggaagagatatttatacttacgaagaagaccgcccgatcaactggaaaatttcttcggaaaccacaaaaatcggagattataaagttcagaaagcagaaacggattttggaggaagaaaatggacggcatggtttaccacagatctgccttatcaggacggaccttataaattcggcggacttccgggactcattgtaaaagtggaagatgacaaaggagaatattctttcgacttaatgaaaaattataaaatcgcagattttcctacgatgagccagttcggaaacaccattaaagtgaaaagaggcgattatgtaaaacagcagaaaaagtttatggaagacccgatgtcatttatgacacaaggtggcggaatgggtgcgccggtgagaattgacggcggtggaggaaaccgtggcggcggtggattcggaggaggaaattccggagatttcagaaaaaggatggaagaaagagtaaaagaggaagcaaaaagaaacagcaacccgatagaattacaataaaaaattaaccctgaagattggttcttcagggttttttatttggctgatttaaataattatttcaaaagctggttgaaagtatctccctgtcggatgtctccggtgttgtatcctttcataaaccattctttacgctgcgcggaggatccgtgcgtaaaactttcctgattaacgtatccctgtgatcttctctggatattatcatcacctaccgcttcagccgcttcaatagccgactgaatatctccgggttcaagaatgtgcttttctgcatctgttcttcttgcccatactccggcataaaaatctgcctgaagttctgtggctacagaaaccctgttcatttctgcttcagaatattttccgcttcttcttagctgatctactttttgcgttgttcctaaaagcgtctgaacatgatgtcccacttcatgcgccaaaacataggctaccgtaaattccgttacttttgctccgaatctctgctgaagttcattaaaaaagctcatgtccatgtaaacagactgatctgcaggacagtaaaaaggtcccattgcagactgtgccactccgcagccggattgtgtggtttccgaaaaaaggataattttcggtggagtatactgcattccgttttcctgaaaaacctgatcccatgtcgtgatgttccattttcccatcatatctaccatttctccgatttttttgtcttccgcagtcagttctcgctgctccgttctcggagatccggaacccgctcccgaagaaagaatcgaggaaggatcacctcccaaaaagaatataattgcagcaataataagcgttcccagtccgcctcctacaacggctccgccgccaagtccacgtctgtcttccacattaccacctctgtcgtccgtccatctcatagtttgtattttttatttgttggtaaatttaaaaatttaaaccatacaatttttgtgcggattatgatattttcaaaatatttatcgattcagctgattttttttcagccagaaagaagtcgactgatacgctgaaatcgttgcatccaccatcggtttattctgttctttttcttttaaaggattttcatcaaaataaatattaaattccggagcgagattgtttttctgctgaaccaaagcgtattgcttaatttttcttaaaggagaaataaccgttaaataattatcttttacaaatcctaaatcctgatacgttgctacataagctttcggctgaaattctttgctgaaaacgtcctgtcctaaaaatttcgactgatagctgaagttcagcaaaccgaaaacagtaggcatcacatcaatctgagacatggtctgcgtaaatttctgcggctggataaatccttctgaaaaaaccattgccggaattctgtatttatccatcggaagttctgtatctcctgcgctggaagcgcaatgatctgcaatgatcacgaagaccgtgtttttataccaatcctgttttttagccatttcgaagaattttttcaaagcataatctgtgtattttacaccgccttcacgggattttgcatttccagggatatcaatttttccttcaggataggtaaaaggtctgtggttggaaaccgtcatccagtgattgaagaacggctttccggattttgcttcggcattcatggtctggatggctttttttgccatgtcttcatcggcaacgccccaaacgtttgcaaacgtgatttcttccggcctgaaattatttctgtcgacaatatcataaccgtttccggcgtagaaatcctgcatattatcgaaatagctgtaccctccgtacaaaaattttacatcatatccttttgatttgaaaacacttcccgtggtaaatttatttttgttgttctctcttttaataatgctttctccggctgtaggcggaatacagagcgttaatgcttccagaccacgaacggttctgtttccggtagcgtaaagattggtgaacattaatgatttatcggctaaactgtctaaaaaaggagtgattttctgcgtatttccataatgtgctaaaaagtctgccgataaactttcaatggaaattaagaccacattttttttcagttccggttccgcaggtacaatatttcttttcaggacaggtggagcaaactggcttaaaaagtttttttctgcctgactctgattaatttctggataaaactggaaataatccagctcgttgtgggtaaatgcccagtagaatttcggaagaccatttgcctgaatctcttcttcaaaaacgctgtttcctttaatctttgttgtgaaatttaatccaaacaagcttactcctacaaaaagaataaatgatcccagtaaaataaatttctgcttcagattcggaagatctgaaagttcttttttggttttcttaaaaatgaagaatgtaatggaaagtgttacgataaaaattgctgagaaaagaggaacaacaggataactttccatgatgtttccaatcacttcattggtgtagataagataatccaccgcgatgaaattgtacctcaatccaaattcgttatagaagaaatattcacttacagcgttgaatacgatgagtaaaacatacagaaacagggttatgaaataaagtatgtttcttattttcaaacgttgttttgggaggaaaagcattaatgcgaagcatataatctttaacccgataaaggccagagcaatttctgcaaccgagccgccgtattgtttgaaaatattgttaggaatcagaaggatgtacaggaaaaaaagtactaaaattcccaaaatgatctgtccgtaaggtttctgatattttgaattggagagaaataaaaaatagagggctaaaaaggtgctggctaaaataaaaaccaaagcatcattgaggacacccaccaaaattatttttaaaatttcaaacactccaaaactggctgtggtaatgggatgaaagaaaaatacaatccttatgattaaagaaatgataaggtaaaagattcctaaataaaggaatggttttgttttctgaacaaacattgttatgatttgaatatgaattcttacaaaaataagtattgaatattatctgaacgtattttttttaaaaataccacaataattagaaagtttataaatatttaaaattattttaacaatataatattcaggagataactgttcggggacaaaaaaaagaactattcttcaatagttctttcaaatatttttattttgaaaattacgaatttccaaatccgatatttccttttctgcctgaaagattctttttaaaatcaatcatttgcagagccgtaacagccgcttcaactcctttgttcccaagatcgccgccgcttctcgcaatcgactgttctttagtgtcgtctgttaaaacacagaaaatcgtcggagtatccgtcaaaatattacaatctttaattccctgtgcaaccgccgaacagacatagtcaaaatgcggtgtttctccacggatcacacatccgatcgcaattactgcatcaaaggttcgttctttacaaagctgcatacttgcgtagcttaactcaaacgctcccggaaccggaaaaagagaaattttttcagattttactccctctttttgaaggatttccagagctgcatcacgaagattgtaggttacaaaatcattccactcagaaaaaacaatgccgatagaaaaatcatcggcattggttatgttaagtggcttgtaatcagaaagattaactgttgccattgtttagtaatatttagtcatttcaatataagaatcagacattccgttgtcgtagtcctgatatttttcgtcgattgttgcaaaatactttttcgcttctgcatttttctttaatcctaaagctaaaatacctgcttttcttgtaaaataatacgttgtgtaaggatcgtctgaagctgaagcggctttgtctaataactgaagggcttcatcatttttgttaagaccggattttgcatctgccatcgctccgtatttcattgccatcaacgttttgttgtcggatgaaaaactgtctaaaagatcataagcttcctgaaattttccttctttgaattttatcaatccagcgttgtaagcagaaagcttgcctacgttggttgcagaatattcgttataagttcctaagaaacctgggttcgcagcagattttccgcctaaagcttctttatctttaccgtcagcaagatttttctgagcagccaggaaactttttacagcttctgcatttttaggagctacaacaaattgtttgtaaccgaagaagcccagaactcccaaaataagtagtccgaaaacaattcccaaaggttttgaatatttttcaaggaacctttctgtgtttaaagcctctctgtcaagatctttaaaaaactcaacagtttctttaccttcctgctcgtttgtaatttttgccataaattattaaaaattgaaatgcaaatttaattgtttctgaatgatttacaaaatactttgtgcgtattgttgattttatttgaattaatcaagtagaatttttaattatgaatcgtgaatttactaaaaagatgcttcgacaagctcagcatgacatctctaatactatatgtattgatgtaacgttaaattattagcgttgtcatgctgagcttgtcgaagcatctaatttaattcagtttaatattctaaaatatgataaacttctgcattgaattttttcagtttttcttcgccttttaaatctttcaatccgattaggaaactgaattgggaaacggttgcaccttgtttttcaaccaatttagcggcggcttcagttgttcctcctgttgctaaaagatcatcatgaatcaaaactctttgtccggattttaactgtccttctcgggtttcgataacagcacttccgtattcgagatcatatttttctgaaatcacgggtggcggaagttttcctgcttttcggattaaaataaaagaaacttctaaggcaacagcgatggcaatcccgaaaagataacctctgctttcaattccgcatactgcatctacttttcctttgctgaattgtaccagatctgtaatcacttcttcatacagtttcgggttcaggaaaataggagagatgtccttaaactgaattcccggaatcggaaaatcagttatattttcaatggtttcttccagtttcgtgatgagctgctgcgatgccattttttatggattgattttgtagctggaaattttccagtctccgtttacatttttaagtccgaaagttgctctcagagaagttgtttttccacttttatccgttacatcatacgttgcactcacacttgcagaagttgtattggaagcattggtggtgatgttttttacgcttacatttttcaccgaaccaaatcctgaagtcgggttcgagaatgactcatagcttccccaactcgggttgcttgcagagttgtacgcagcttttaggttttgagcgcttacgttatttaaaaatcctgaaacggtacttttcggatctgcagccggctgttttggcgctgcaggagttgttggtgtggctgcatttggatctgttgtggaaggaaccgttgcattcggattattcggatcgattacagcgggatcctgaataactgctgttgaatctactttcggagcagccggaactttcagtaaaagaggatttacgtctaatccgattttggtcattttgaaagttttcgcagttgtttttacagaaaccgtaatatcaattttattatcaacaacttgtgccgcaggaattgaagagaattttaaattaaatcctttgaagttattatcctgcattaagttttttgccgtagaaagctttacgccattgctgaaaacttccagcgttgcttccagacctgctcccgtaaaggatactggatttcctgcgttatcaactaatcttggaacgatctgaagcgcagtaggcgcacctgttccgtcatctccagtcggtcttgtggttatgcttaatgaattggcttttacgtcattcgggtcgctttctttagctgtttcgtttccgaagatgttcatttctcctaatgctcctaatgaagggggtgctgtacttgcccattcgattccgtttttctgggctacctgatctgccattgccatgatttcgggaactttttttccatcaatcatttgtcctaaggctttcagttcagcaaaatcgccatctgcttccactccgaaagttttcaggatgtaaagcgcctcgttaaatttaatctgtttaatggtaggtaaacttgccgtcatatcgttgatactcgactgtaaagttttagtattggtagcatctacatgatcttgcttgcatgctgtgaaaagcaacatgctgaaaattagtagaaaagacaactttttcattttttttcggtttaccacaaaaataataaaacctttattaatagagtgttttattttttattttgttgttctttcagctgatctttgaaaaatgagctgaaaacggtctgcatattcggaaaagatgaatcttcccagtattttgtaatatagctgcttttattggtattcagatttacactttcgatatcattatcgtcactgaattctatttctgcaggataaaaattgctgtaataaatcaactgattgtagtccggttcacttttgtgttttaatttgataaatagaatgtcgttaaattccagaagctctcttaaggtcttattgctttctttttcgtaagaagcatttgagattactcttacatcgtaaaaacggtatcctaaaaaatttacttctttttcctgtaaagcactgtgagcaatttcgatctgatctttccggtctcctttcagttctttaatgacggcattcttttttttatattcctgaatatttccgacatctttcatctcaggagcattcatcattttaccataatcaaaggaagctgtcagttttttgtcaacatttttgtcttcaatcctgaatgctctgtattgttctacattggcacttttcagtttttttgttttattatcaaaaatataagtaatgattccgtctgtgtagcagtttagtttgttgtttacggtaacgtacgtattaaagtttccttttacgaaaatatattttgcaggcttgttattttttatgacaacgcgttcgatatcttttatcctgtcatccactttaataatttctttgtcgaaatccgcataggataaagtcgcaacagacatattatcgtagatgagctgaaacttttcctgatccggttttatggactgcctgtcgatttttccgtcgatatccgaataagctaaaatgctcccgtctttgccaaacacagaaaccttaggaaggggcttattggttttttctgaaatgaaagtgatactttgtgcattgatgaagtttacgagaattgttaaaaataataacaggagattttttttcatgattgatacaattaatgtttttttagttaaatcattctttgattatatgacaacgaaaacttaaaaaggttgcattgtttttttatttctgcacaaaaaagcaaaaaaaagactgatcattacaatcagtcttttttgtttttatcttgttacaaattccttagaaaggatattcataaatttcagattcgtgaaggtaagggttacctgtagggatcagtttaagtttagataatgctgaaagcacagtgaacataaataatccaactacgaataagattgctcctaagattaagataaatacttcaggagttttccagtatggtcctactgttcccggcattaccatgttgaagtaatctaagatgtgaccacaaattacgactactgccattgttgtaaccactttgtagtttctcttgatgctgctgctcactaataccaatagcggtaataagaagtttacaataagcattggtaagaaagtaggagagtagtgctggaatcttccgaagaaatagttaacctcttccggaatgtttgcgtaccagtatagcatgaactgtgcaaaccatgtatacgtccaaagcatacttgttgcaaataggaatacacctaaatcatgtaagtggttatcgttgaactgcggaaggaatccgtttttctttaaataaacacttaaaagaataattaccgcaataccacttgaaaggcagctcaccattgaataccagatatacatggtagaataccagtgaggatcaatagacatcaaccagtcccaagcccaagctgcagaagcaaaaccgaagaatgcgatatatcctactgcccatctgtaaagcatttgatattctactcttgattttgtttcgtctacttttttagactgagctttcagtttccaagcgaagaaagaagcacctaatacatagatgaaagttcttactgcatagaaagggatatttaagaaaattcttttttcaaataagatcacatcgaaatgagcagaatttgggtctgttaattccggatccatccaatggaaaaggtgaccttggtgagtgatgtttaaaatcattaagataattaaaatagcaccaccgtaaggaatataagaagcaatagcttccattactcttgtaatgataattggccaacctgcgtgtgcagcgtgctgaatagaatagaagaataatacgcagcagcttactccaaagaaaaatacagctacaaaatgtattgccgctaaaggctggttgtgaacctgaagagtagcatgctcaaggtgagctgcgtgatcctgaggtcctaccatttcactagaatgcgtaggagctgtatgaccagaagcatgaaccgcttccatcatgtgttctattttctcagtggtaattcctttattcataaagaaaccaacagcaaaaagaactaaacctacaacaagaaggattatagaagttgattttaattttggtgaaaaactatacatttcttttcttattttttagtttcggtagtcatcgtttcagatttcgcaggggcagccgctgccgtagctgttgccgtagccgccgcaggtgctgcagctccttttttgaaagcatccattacatacatggcaactctccatctgtctccagcgctaagttgtcctgcataagatcccattgcgtttctaccgttggttattacataatgaacagatcctacagtaatatctctgtctgcatagtttggtacaccagagaatgctccggactgaacgattggcccttgtccgtctcctcctacaccgtgacaagctgaacaggttttctcgaaaaggctttttcctctttcaagatcttttgcagcgtttgctgggtttaaaggagatcctgttactgtttttgaagcatcataaccagcattgtattcatccggcgtttttggaagtaatccttcttcgaaaacaccatctttattttgagctacggatccttctacaggagaaagacctgttgcaaaattatttttaacaaaagcaggaatttcattttcatgatctgaataagcatcctgagctttcatcaatggatcgtatgctaccggaaaatacatatccgggaaatagaccagcggagtattctcttttggtccgcaagagttaagtaaaactgttgttaaacctaaaactgctgtaatttttaatacattctttttcattttaagcatctttaacagttatttcttcaactccagtttcaataagcaactgctttacagattctacatcttcagttacaaattccattaagaatttatcatccgttgttcttggatccgggttttgtgcaggagctccgggatacattttgtttcttaccaagaaagttaatgacatcatgtgtgctgcgcagaataccataagttcgaacataggtactacgaaagccggcatattgtgagcccagtcgaaagctggtttacccccaatgttctgaggccagtcgtggttcattacataccatgtaagagtagcaccgatcgtaactccataacaagcgtagataaaagcggcatcagaaattcttgttttctttaaccctaaagctttatctagtccgtgaaccggaaacggagtatagacttcgtttattttgattcctttatcgttgaatgctttaacgccgttcattaaatcgtcgtcgtccgcataaagtccgtatacaattttagtggtgctcatctccttcttttgctttataagtttcacctgagattttcaaaatcgattttaattcagcctgtgcaattacagggaatgttcttgcgtataataagaataatacagagaagaacccgattgttcctaaatatactcccacatcaatgattgttggcttaaacatcgtccaagaaccaggcaagtaatctcttgaaaggttgataacgatgatgtcgaaacgctcaaaccacataccgatgttgataattaatgcaacaatgaatgtccagataatattcgttctaagtctcttgaaccagaaagaagcaggaacaacaaggttacagataattagtgaccagaaagcccaccagtaaggtccaacagcagcaccaggagaaagataggtaaagtcttcgaatcttgatcctgaataccatccgataaaatattcagttgcgtaagctacagttaccataccacctgttaagatgattacgatgttcataatttcgatatgatacatagtgatgtaatcttcaaggtgacatacttttcttgcaactaacaataacgtctgtaccattgcgaatcctgagaagatcgcaccggcaacgaagtaaggagggtaaattgtggagtgccatcctttaataaccgaagttgcgaagtcaaaagatacggtagtgtgtacagagaatacaagcggagttgctaaacctgcaagaaccaaagatagttcttcgaatctttgccagtgttttgctttaccaccccaaccgaatgcaaggaatgtataaattttcttagtccaaggtgtcttcgctctgtctctgatcattgcaaagtcagggatcaatcccatgaaccagaatactgttgataccgagaaatacgtagagatcgcaaatacgtcccaaagtagaggagagttgaagttcccccaaagagaaccgaactggtttggtaaagggaatacccaataacctacccaaactctacccatgtggataaccgggaagattgccgcctgtacaaccgcaaagatcgtcatcgcctctgcagatctgtttacagacattctccatctctgtctaaataataataataccgctgagattagggttccggcgtgaccgataccaacccaccatacgaagttagtaatatcccatccccagttaatagttctgtttagtccccatgctccaatacctgttccgatagtgtaagcgatacatccgaatccatagatgaatagaactaaggctgcatataatgaaatccaccataatttacctgctctttcttcgataggtcgtgcaatatcttccgtgatatcgtgataagttttgtgaccaataattagaggttcccttatcggagcttcgtaatgtcctgacattttttacctatttattatttaaactttatttttctactctgtttcttactttagtgtgatagaacacatttggttttgttccgatctcctctagtaaataatatcttctgtttgaagcatactgctttctcacttcagattctttgtcattcatatctccgaacttgattgaacctgtagaacaagctttagaacaagctgtctggaactctccgtccttcacgattctattctcttttttagcttcaagaatagtagtctgagtcatttggatacacatagaacatttctccataacccctctcgttcttaccacaacatcagggttcagaaccattcttccaagatcgttattcatgttgaaatcgaacttgtcattaaggttataagtaaaccagttgaaacgtcttactttataaggacagttgtttgcacaatatcttgtaccgatacatctgttataagccatgtggttttgtccctgcttaccgtgtgatgttgccgctaccggacatactgtttcacaaggtgcgtggttacagtgctgacacattacaggctggaagattacatcaggattatcagccgggtgattcaatgcaccgccttctttgttgaaagctgttccgtataattcaggaactgccattccttcttttaatccttcataaacttctaccttctgtcttgatgaatagtaacggtcaattcttaaccagtacatatctcttgacattcttatttcttcttttcctacaaccggaacgttgttttctgcctgacaagcaatgatacatgctccacaaccagtacaagagttcaggtcaatcgataagttgaagtgaggaccatcggtgtcatcaaaagcatcccaaaggtcaatttttcttgccggaagagctccgctaatggtgtgatactccaaaggtttgttccatccgtcgtgttcatcatcaaatgctacgtttaagaaatcagccaaaggtacttctttagcaatttcgtaacgtcccattaatgtattctgaagctggatacctgcgaattcgtgatcttctcctgttttttcgattttaacattagaaacaactaagttagaaccatcgaataaaggataagcatttacaccggtatctgctgtcgctcctgagtttttcttaccgtatccaagcgcaagacctactgatccgtctgcttgtcccggttgtacgaatacaggaacatcttttattgttactccgtttacagtaaggtttacaagagaaccgtctaactgcattctcgcgttaagatcgttatcaatacccaatctttctgcgtctttcggagacattgttaaatagttatcccaagacattcttgtaattggatccggtaattcctgcaaccaagggttgtttgcctgagttccgtctcccattgctgtcttcgtatacaataccaattctagatctgaagctttgaaacctcctaattcagcaacagcctgtgaaccgtttcctcctgcgtacgataatgttgtcgcatttgaagaagcattgataccgttatataaagctttgttgaaagaagttgctcctaagatagaagtagcatttgcttttaaataatcataataattattagcagcattgtttttaccgtttttccaaaccaataaagattcttcaatctgtcttgatttgtatattttctgtatcgtaggctgcattaatgaatatactcctgtctgtggttcgatatctccccaagattccagccagttggctacaggaattacagctttcgctgctttgtacatttcatttttcttatctgcaactgcgattacataaggaactttagataacgattttttgaaatcttctcctttgtggtaagagtaaataggatctacattgttagcgatcaatacaccaacctgtccaccgtttacccatccaaggaattcctcgaatcttgctttgtcaaaatcttttaagaagtttgctttccctgtgaaagctactgatcctaatttttggttaattaagtgcgctaaaacctgagctcctttagaaccatcagcgaaaacaactgctttgcttccttttgccaataattcttttgcgatttcagatgcagctttgtcagaagtaccaccaccaacgattgcattgtaaacttcaactaacgttttatttacctggcttggtttcagtctgattcttgaatctgcgtttgctcctgttaaagacatattggattcaacctgaatgtgtctcaacatattttttcccggagttcttgccactgcgtaagaagattctaaacctcctgcgttgtaatctcctaagaaatcagcctggaatgcaaccaccaattcagttcctttaagatcgtaaattggtaatgctcttgttccgaaaacttcctgagccgcgtctaatgcagcagcataaggataagcatcataggttactaattctgctgtaggatatttagctttaaattcagcaaataattttttgaaagtaggggatgcaaaagaatgagataataaaacaattcttttacctgctgctttagcctcatccagtcctttgataacgaagctgtctactttgtcgaaagtttcgtctttcccttcaaatttaggctgctttactttatcattatcataaagagaaagtacacttgcctgagctcttgcattcgttttacctaaatctcctgctgccgggtttggttcaattttgataggtcttccttctcttgtttttaccaatacgcttgcgaaatcgaaaccatcgaaataggttgaagcgtaatagttaggaattcccggaatgatttcatgtggctttaccacataaggaatcgttttgattaccggagcttcacaggcagccagtgttactgctgcagtagagaaacctaatagttttaagaaatctcttcttgaagtagcagaaccgtttttttccgcatcatcaaggaaatcttctaccggaatttcttcctggaactctttctgagccagcttattgtttaaagctggatctttaagttcgtgaatacttctgaattgtattttgtttgaagccatttgatacttctaatttttagttattaataatgacatttaccacactcaagacctccaatagcatctaccgtaatcttaccaccatctttagggtactgttttttcaacttgtcgtgtagattcttgaagtattctttattataaccgttgttcatgtcaacttctgtagttctgtgacactcgatacaccatcccattgtaaagtcgttagccatctgaacaacattcattgtatcgatttttccgtgacaagctttacatacaacatcaattttgttgttagggttctttttgttgaaagaattgatgatcgcctgttcacctgctactacgtgctgtgcgtggttaaagtatacgaagtccggcatgttgtggattcttgtccattcaaccggctgagtttttcctgtgtactgttgtttttcaggatcccaacctgtagcggcatagattttctttatctctccgtcatagaaagccttatcttttcctggctccatgtagtgatctgcgttgtattcagaaattgttctgtgacagttcatacaaacgttcatagaagggatttcagatactttaccgtatttggcactggagtgacacaactgacagtcgattttctgttctccagcgtgaattttatgggagaaataaataggctgttctggcttatatcctttgtaaaccccgatccacatgatccagttccagattccgtaagttgccagaagtgcaaggattgcgattaatccttttcctacatagtgatattttgcatagatttcgctgaaagattttacccttgtttcgttaagaccggctaagtcgtctgactgacccaattttaccaattgtcttaattttaccaagatccaaaccaatagcgctgcgattgctaaaagtgaaatgattactacgcttgttgtagtgttgtttgccggagcagcctgatcagttgttgctgctgttgcttttgcatcatcctttttaggctcttcagccggaggatttgaggtgtatgccaagatatcgttgatatctttttctgaaagtttcccttcaaaaacctgcattgccgcttttccgttggcttcgtatacttcattagcatacttgtctccggaagctctaagtttttcattgttggttatccatttttgaaaccagtcaatgtctagattttgatcttttttcagtctttcaactactcctccaagagcaggacctacaagtttcttgtctagtgcgtgacatgcagtacaattcgctttgaaaagcttctcaccattcttaggatcgccgtcctgcccgtaaattgaagcactggtcgatagcaataagcctattgcgatcaacgtctgtctataatgctttctccaactaatcatttaaattatcttatgttagtaaatattgaacattcaatcaatcccgcaaaaataatatttttaacaggaatttaacggtatatggaaaggggaaaatgtcatttccgtttaatttgtaattattctaaataactgaatttggtataattttttaatttgtataaatttgcgcaaacaagtttaaatgaaaaatttaatcaaaataatttcgatgctgtctgtgcttgcattttatggtgttgatgcacaacaagttgtaaggaaagatactttggcaggaactgaacttaccatgacgatggattctaaggtgaatgcggctctggaaagcatagaggataagtgttccaaaacaactttggcaacttcttcaagggaagatgacgaagattacagcccttcaaaaccaactaaaatttatgttccgaacagggaacttaccaatgctgagatatgcaggaaaaatccaagaattttagggtataaaattcagattacaacagtaaaaagtaatgaggaagccaatgaggtaaaggcttatttcagaaaaagatttcctaacctgaaagtggaaacggatgcttctttaagaccgaattataaaattttagcgggaagttatttcacaaaacaaagtgcagcttctgatctttccaaagtgagagaatattttaaatcggcacttgcagtacagtacagaattttctgtgcggaagcaaaatagtagaaattatttagcataaagtaaaaaagctgggaaaaattatttctcagctttttttattgattttgaattttaatttttcaaaacaaaaagtaaaattttaataaaatttatttaaaaaccaaaagaattcggtcattctcaaataattgttggtgatcaggtaagcgcataaaatcataaagattgcggataaaaaagacaacattttcggtgattctttataggcataaaaaagccatccgatcaacagcggatagacaaaaacgaaatgccctccgtagatgtaagaagtatgaagtccgaatctcataacacagtgaatgataatatcaaacaggaatgaaatcattaaaacctgaacgagtttatttctgagatttttaaaataactccaacaaatcaggatcaataaaacggcaataaagatataaggaatccatgatgaataaacagtcattataatccctttatagtggtaaccgctcatattatgtttatcgcggattagaaaatttgaaaaaagtatatttcccccgaaaaagtacgaaagaatcatatcccatgtaggagtagaatttacattggagaatttttcgtactgttcattggttttgctgaatatattctgatatttaaaattgattcggtttaagtataataaaacaaaacagacgcaggtaaaaattcctctgaaaaccgcattcccaaattttttccagtttctgaaaacttccttttcaaaagcgacgggaataaagactttaacaatattcgttaccgttaagcctccgatggtaactcctgaaaaagctaaagctaaagccggaattttctcctctttctttaattttatagctgaataatgatgaaagagggtcaggaaaaataaagtgtaggtaaagttttcaggagtgaaagaaaggagaatattcgttgaaaatgctccgaaaaacagaattagtaaaaggtttaaaactaaaggaagacggataatgtttttaagatatttaaacacctgaagaatgcttaagcttaccgcgagattactcagccaggctaaagcgaaacggaaatttccatccatttttccgttggagaaaagtaaagccaattcgcggatccagttgaaaaaataataggagagagggtgtctttcaaaacttccgccggtcatcacaatagatttattatcgaagctgaaatacgcatcccaaggaattcttccgtcaaaaataattttatgatgaatggcaatgtgtgatcccatatatccgtaagcgacgagaaagaaaagaaaaacaataagttcaactcccgttgacggaaaaagcaatttgaaaaaatggataaattttgttttgaattttgacacctgcaaaaactttctgcaaaagtaaaataaaaaacccaccaaatctgatgagtttttgttttgattttatgattttaaaactacgaactgcacgaaagcgttgaacatcccgatacatcatcataatctgaaggtctttttgctgaaaattccggataaatggtatgataaggattttctaaagcgtgggtcagttttgtaagcaaatcggttttaccgttattaatttcttcaatgcattggtacagcagataattcctaagaataaattttggattggttttatgcattatttccaaagatttttcttttgaaataatatttttttctaatcttgactgataagctttcataaaatcctccagtttcgaaagtttctcatcatttaaaaatgtgtaagaaacgttttcaaattgctgtctgagatctttctggtcatcatatttttcgagttcattgaaaaataaggtataatctagttgaagatcctgcatcagactttgccatgtggtaaagaatttttcatcgcttgttagtaactgatcaaaaccgaattttctgcacaacattctgtcgtgcgattcccagaaatagcttccgtaatcatttaaaacatcttccagaaatttttcatccttaattaaaggatgaagggcatttgccaattgccataggttccattgagaaatctgtccctgttttccgaaggcatatcttcttccgggaagatcggtggtattcggggtaaaatttaaatcgtattcatccatcatcgaataaggtccgtaatcgatcgttaaacctaaaatcgacatattatctgtgttcattaccccatgaacaaatcctacacgataccattctaccataagatctgctgttcttctgcatacattttcgaagaaatctttgtacttctgaatcccctccgaaggaatttctttgaaataatgatgaatggtataatctgcaagttcctgcaatgttttgtactcctgttgggcagacatcaattcaaaatgaccgaatctaagaaagctttctgcgattctgatgactaccgctcctttttccagttcaggatttccgctgtacatgatatctcttacaacgtcttctccggtaaatactaaactcaatgctctggttgtaggaactcctaaatgaaacatcgcttcgctcatcagatattcacgaacagacgaccttaatacggctcttccatcggcatgtctggaataaggcgttgctccggctcctttccactgtatttcgtttttctttcctgaattgttttcaatttctccggcaagaatggctcttccgtcgcctaattgtcctgcccagtttccgaactgatgtcctgcataagcagtggagtaggttttgatattttcgggaagatgtgttgcggcaagaaaattaagatctttatcctcaaatttgccaagcccgatttcttctgaaagtttttcgttgaaagcaatcaattcagggttgttaaaacctactggctcaacggtggaaaataaaaccttcggagtatttctctgtagggtattgcctgagaaatctcctggaaatttttttataaagggttgctgtatattttcgatattcatgcttcaaaggtattaattaaaaagaaaagaccttccaaatgattgaaaggtcttgtgtatttctaaaaaagaatttatttattattgaagtctatgtcttcacctgtatttaggttttcatttacattttcttcttttttaccggatgtttttggtccgcttggatctgccggtttcggatttttgatctcatcaagcgtctgtaatccgccatcatctccgtaacctgcgcctaatcctttaagatttgaacagccgtctttccactccgaaggtttcacgaatttatcatccggagaaatttttaagcttttatctgcccagactttcttcatgtagattgcccagatcggtaatgccattttagctccctgtccttctcctgttccgtagaagtgggtggctctgtcttcccatccaacccatgctccggttgccagtttcggtacaattcccataaaccaaccgtctgagttgttctgggttgttcctgttttacctgcaatttcgatatcttttgaaattccttttcttcccagttctccggaagccgttccgtattgtgctacacctttcatcagttcaatcatggtataagcgtacagcggattcatcacttctttaggttctacatttacttccttaattacgcggctgttggcatcttcaattctccagatcatttccggtttgttgtagttaccgtagttagcaaacgtactgtaagctcctaccatttcgtagatggtaatatccgaagctcctaaagccattggtaagcttgtggagatttcttctgttactcccaaatctctcgcggtttgtattacgctttgtgttcccgtcatttcggcaagacgaagtgcaacagggttttgtgagtgcgccaatgcatcttttaaagtaagcattccccctcttcccggaacgtgataagttcctttgttaaagcttgcattagaaatagtagaacaaggtgttaaacctagtttcataatcgcagttgcgtaaacgaaaggcttaaatgttgaacctacctgtcttttaccctgcttaatgtggtcatattggaaatgctgccaatcgattcctccaacccatgctttaatttctccagttcccggaatcacagacatcaatcctgcctgagcaactttcttgtgccatctgatagaatcccaaggagacatttctacttcttcttctccagcccatgtaaatcttgaggttttaacaggttttttaaattccattaaaatagaatcttccggcattccgtctgctttaagaagtttgtagcgtcctgttcttctcattgcctgaagcatcagatcattcacctgcttatcattcaggtaatagaatggccagttttttcttcctctttgttcagcgtcaaatcttttctgaagatccgttaaatgctctctgattgcatcttctgcatatttttgcattctggaatcaagagttacatatatttttaaaccgtctttgtaaaggtttaattttttaccggtttctttttcataatcatcaagatactgatcaatttcctttttcagataaaacttataataagcagaatagtcatcattgatatttttaataggatgataatctatttttataggtgtttctacagccttgctaaaagttgcctgatccaaatatcctgttttcagcatttgatccaaaacaacgtcccttcttgcttttgctctttcgggatttctcatggggttgttttttacaggattttcaagcatggcaacaaacattgcggcttccggtaaggtaagttcggaagttttcttattaaagtaaatcttcgaagccatttcaattccgttggcattatataaaaagtcaaatttgttaaagtataaagtaacaatttcttcttttgtatatcttttctcaagacttacggcaacaacccattctttcagtttttgaaaaacagcttttattttattgtcagctctttttccagtaaacaataattttgctaattgttgcgtaatggtagaacctccaccgcgaccgcctccaaaaactactgctcttgcaactgactgtaaatcaattccagagtgttctttaaaacgctcatcttctttagcctgtaaagcatagattaaataaggcggaagatctttataaataataggctgtgttttctctttttcaaatttacccaaaagaactccgtctgaagagtagatttgtgaggcaacataaatatccggattttcgagctcttttacatccggcatttctccgagaaatccttgcgatacggcaaagaatagtcctgaaattcctaaaaccaaagcaaagaatccgatccagataaatttaacccaccttttccaggtagtgtctttctttttaggaggaagagggaaggttttccctttgttcccagtattttgtttgttcacttccattgatgattacggtttagccgtttctatttttactccaatgtcttcaattcccggaaggttgtcgtttctcatcgcctgagtaagaccgatttcatattttccttttgcgggaaatttataattcagtttatattgaaacaaagtttccttcgtatctccaaatcctgttccgagccattctccgttaggttttgccaatacataatttaacgtatccgtttgctttttcttactttgaaggtcggtaaaattgacaataaaccttatattgctgtaaggataattgttattatttcttacaacaaatataatatttttaggattttgcggatctgaaatttcaagattaaatttttgttcacttttcttattccatttgttatcaacagaattcataaaaacttctccttcggaggaagaattacagctaaagaaaagaataagagtaaataatcctaaaattttacgcattgttatctttttttggaggaaacttctttttaaatttctttttattcgggttggtttttttctcggtttcagcaccagaagaagcatctactttttccaactgaggtttaggctgttgaggcttttgcgttctcggttgatgattattagaattggcttttggattttgctgctgtttttcctgtctttgaggtttttcaacagatttttcatttctttcaggacgctcctgtctctcaggtcggttgttgtttttcttctgaccctgctgattctggctgttctgattgttgctattcggtctgttttggtttttatttctgttgcctctgtttttcttttcgaaacggtctacgttattctcctgaatcagatcaatacttgcaaaaggcgtttccggctgtttcagctcttccagtggaagtgttttttctccacgtttgtttttggagatcagctttttaaccaaatcgatatcgaaatcgtaccacgcaattgaattttctacataagcaaaccacattttctttttaaaaacgtcgattttaatgcagaaagctcttcctttctcggtatccagagtggtggaagaagacggaaaattgcttaaagcatccagataactgtctaattcataattaagacaacatttaagtttaccacattgccctgcaagtttctgaggattgatactcagttgctgatatcttgccacattggtgtttacagatctgaaatccgttaaccaagtcgaacagcaaagctctcttccacaagatccgattccgcctacttttgcggcttcctgtctgaaaccgatctgtttcatgtcgattttcgtacggaaagctccggcgtattctttgattaactgcctaaaatccacacggttatccgctgtataatagaaagtgactttagaagcgtctccttggtattccacatcggtgatcttcatttcaagacctaatctgtgtgctatttttcgggcgtctatttttacgctgtcctctttttttcttgcttcctgccagacttccagatctttctgattcgcctgtctgtatatttttagtgccgattcttcagaacattttttctttttcatctgaatctttaccaattctccggtgagacttaccacacctacatcgtgtccgggactcgattctactgttactacactacctatatgtaaagggatattgtttacgtttttataaaacgattttctgtcatttttaaatctaacttctacaaaatcacatcggttcggtgcgggattgttgatgttagaaagccagtcaaaaacacttaatttataactattaccacaggtatttacattttcacagccattcgcggtcttcttgggtccgcaagaatgtgcagaatcgccggatgttttacatccacaactcatatataatatatttaatttgcaaatttatgatttttatctttatgaggtctaaaataatcaaattatcgggaatagctttgtttaaaactaaacaaaatcgcatccggatgatataattttgattaaatgtttaactatgatgtgtttacaaaagggtttacttaaagtgctattttaaacatagttttcttttgcgttgatgtttaaaattttatgatttattaacagatgtatctaaaataattttatatttggattatataataatagtctatgaaaaaaatattgatatcaacagctttattggcaggcgtattatcttatgcaggaggcttcagggtttctctgcaaggggtgaaacaattggcaatggcgcataccagtgcacatgctgaagatgcgagtgttacgttctttaaccctgcgggaatgtctttcattccttcaaaacttagtgttgctgcgggtggattcgggataagttctaaagtaacctatcagaatcttactactttggaatcttattctacggataatcctatgggaactcctatttatgctgcggtagcttacaaagttttagataatctttctttaggttttaatttttcaacgccttacggaagtacggtagaatggccggataactgggctggaaaagaaattgtagagaatatagaactgaaggcattttattttcagccgatggtttctgtgaaattatcaccttgggtttctttcggagcgagctatatttatgctaaaggaagtgtagactggacgaaagcagttactcaattaggaggaaatttaaatctaaaagatgataaggcttcaggacacggttttggtttaggtttctatttcagacctgaagaaaaactggatgtaagtattgcatacagatctccggtttatatgaatgcagacaaaggaaaagctacatttaatatttctcaggcattatattcttcagtaagattagatgctaacggacaggataactttaaggctgttcttcctttggtggatgaatatacaattggggttacctataaaataacaccgaaatggcaggtttccggagatttcaactactacggatgggagaagtataataaacttacattagattttgaaaacgcattggcaggaaatcaggcagatgatcctaccaaaaatgtaacgcctaaaaacttccacaattctaaagctttcagaatcggaacgcaatatatgattacagataaagttgcaggaagattaggatattatcatgatgaatcaccttatgacgacgcacacttcagcccggaaacaccatcttttgatgctaatgtaattaccggagggattggatttaaactaaataaattaggagtagacctttcaggagcttacaacttccagaagtcaagaaatataaacaatgcattttataacctttatgggcaggctaaagcacaagcattttactttggtttaggtttgtcttataacgcattttaatttttaatcaagaattatgaaaaaaatattaatttctacattcgctatttcagcgttgttgttaaatgtaagttgtgatacagacttcgatactgatgtaaaggatgtggtagtaacttccggagaagccaatttttccaaatatgtatctttaggaaattctcttacttcgggatatagagacggagctctttatttggatggacaaaacgaatcttatccttcaatgattgcaatgcagatgaagcttgcaggaggaggtgattttaaacagcctttaatgccaaataacgttggtggatttaataatcttccgggattttcgggtaaactggttcttagtgtagtaaatggctcacttactccggttgcatctgctcctgcggcggcgttagacaacatttcttcaggtgcaccttatcagaatttagggattccgggagcaaaatctttccatttgggtattgcgagctatggatctcttaatccgttttatgcaagattttctacaggggtaagtcctgtagcggcggcagtagctcaaaatcctactttcttctctctatggatcggaaataacgatattttaagctacgcaaccagtggaggaacaaattctacaacaacaggaggcgttacaacatatacacctgctgtagttcagacaggaaatattaatcccgcaacgtatggatctaatgatatttctgatcctaatgtggtagcgtccagcatcaattcttatgtaacagcgcttacagcgaacggtgcgaaaggggtagttgccaatataccaagtgtaaccgctattcctttctttacaacggttccttacaatccgttaactccggctgctttaggtgctaatcttaatacgctaaacacaagtttgtacggtccgcttaaacaggcgcttacagcttttggagcgggggatagaatcaatcttttatcttctactgcctcaaatcctgttttgatcagagatgtttctttaacaaatttatcagcacagcttactgcggcacttacgccttctttaggagcggctacagctgctgctttcggacagatctacggacaggcgagacaggcaactgcagaagattatatccttcttacgaccagagcggtaatcggatctactaatccgaatgctccggcttccattaatgtatacggtatttcttatccattagaaaaccagcacgtgctttcaaaaactgaagcagcaaatgtcacaacagctatgactgcctataatacttcaattaagtctattgcagatgctaaaggacttgcatttgtagatgcaaatgctaaaatggtagaacttaattctcaatccggaattttgtatgatgggataagatacactgcaaaattcgtaaccgggggagctttctctctggacggggttcaccttacaggaagaggctatgcaattattgccaatgaatttattaaagcgatcaatgctaaatataaatctaccttaccacaggtaaatccaaataattattccggagtaaaattcccataataactggataaataaaaacttagaaaccacaagagtaattcttgtggtttttttttaaatttgcaaaatctttaaaaagtaaaaatggccgatcagttaagttatctattttctacaaggacgagtaaggacttggcagaaaaaattgcccaaaattatgggaaagaattaggaaaaatcaactttcagacattcagcgacggagaattcgaacctgttttagacgaatccgtaagagggggaagagttttcctgattggatctacgtttccgccggcagacaatttattagagcttcttctaatgattgatgctgctaaaagagcttctgctaaaagcattactgtagtacttccatatttcggacttgcaagacaggacagaaaagaccaacccagagcgccaatcggtgctaaattggtggcaaatcttttaacagcagcaggagctacaagaatcatgacaatggatctccacgcagatcagattcagggattcttcgaaattccggtagatcatctgtatgcctctacaattttcgtagattacatcagagatctcaatctggaaaatcttacgattgcttctccggatatgggaggtgcaaaaagagcgaaaaactatgcaggtcacttgggtgcagatgtagtaattgcttacaaggaaagaaaaaaagcaaacgttgtagaagaaatgttccttatcggagatgtggacgggaagaatgttatccttattgatgatatgatcgatactgccggaacactttgtaaagcggcagacatcttaatggaaaaaggagcgaaatctgtaagagcaatggcaacgcacggagtgctttcaggaaaagcttacgagaatattgagaactcaaaattattggaagttattgtaactgactcaattcctgttaaaaataatttgtcatctaaaataaaagtgctatcttgcgccccattatttgcggacgttatgaagatggttcacgagcatcagtcaattagcagtaagtttgttatttaactgatatttagaggtttgcaaatttaatttgaaacaattttttaaattttttataaatgaaatctattacaattcaaggtacaaaaagagaaagcgtgggcaaaaagtctacaaaagctttacgtgatgctgaattagttccttgtgttgtttacggaggtgaagctcctttgaatttctctgctactgagaaatctttcaaaggattggtatacactcctgaagcacacacggtatctattgaggttgatggtcaaacaattccggctgttcttcaggatattcagtttcacccgattacagacaaaattcttcacgcagatttctatcagttatctgatgataagccagttatcatggaagttcctgtaagaatcactggtcgttctaaaggtgttgtagctggtggtgttcttcgtcagtctttcagaaaactgaaagtaaaagcaatccctgcaaacttaccggatgagatcgttgtagatgttactccgttaagaattggtaacaaactttatgttggaggtatcaaaactgaaggatactctttcatgcacccggacaacgcagttgtagtagctgttaagatgtctagaaatgcaatgaaaggaggtgcagcagcaatggatgatgaagatgaagaagaagttgcaactgaagaaggagcagctcctgaagctacagaagcagcagcagaataagaatttctgatttaaaaatataaaacctgtcaaattttggcaggttttttttatgactaaaagataaatatgatgagttcaaatcttggttaatcttttattagtgaaacgtctttgtaaaactaaaaacatcaattaataaaaaatatagaaatcaaaatttatttaaatcattttcattgctatcactcgctgagtgagacgcccttgcgaaccaaaaatgtctaataaaataaaaattctcagcgatcttagcgttaaaagcaaaaaagaatatttcacatcgaatttttctatcaaacaacaacaatcaactctcagctacaatccgaaaaaaagccgtaaatttgaagagttctaaataagaacagtttaattaaaaagttaataaatgtttgacattcaggaaatcagaagtcagttttctatattagatcagaaagtgaacggtaaaccattggtttatctggataatgcggcaacctctcaaaagccggattccgttttggaaatctggaataaatattacacagaaatcaatgcgaatgtacatcgtggaattcatacattaagccagttggcaactgaagagatggagctttccagaagaaaaatccagaaattcatcaatgctgaacatgattttgaggttattttcaccaaaggaactaccgaaggaatcaatttgatcgcttatattttaacccaaaaattaaaaaaggacgatgaaattattatctcttatctggaacaccattccaatattgttccgtggcagatgctttgtgaaagaaccggagcgaagctgaaagtcattcctatggatgataacggaattcttcaactcgatcagtttgaaaaatttttaaatgaaaatacaaaagttgtttcggttaatcaggtttctaatgcattaggaattatcaatccgattgaagaaatcattgcaaaaacaagaaaaaataccaatgcttacatcgttatcgatggagctcagtctgcgcctcattttatccttgatgttcagaaaatggactgcgacttttttgttttctccggacacaaaatgtatgctccaatgggaaccgggattctgtacggaaaacaggaaattcttgaagatctgcctccatttcacggaggaggagaaatgattgccacgtgttcttttgacggaactacttacgcaggtcttccttttaaatatgaagcaggaacacccaatgtagggggaaacattgctttgggagctgccgtggattttattctgaaagtagggcaggaaaatattcagaaccatgaaaatgctttgctggaatatgcgcagagacagcttctggaattggaaggcattaaaatttatggtgaaaaagccaacagaaccggtgttgtttctttcaatcttgaaggagtcggaattgcttccgatgtgggaatgattctggataaattaggaattgctgtaagaacgggacatcactgtacacagccaattatgaatttctttaatattgcgggaaccgtaagagccagttttgcggtgtacaatacattcagtgaaattgatgctttggtagaaggcgtaaaaaaagcacagaaaatgctaagttagacttagatttttttataatacaaaacggtcagagaaatttctgaccgttttctttttatatggactattaatttaattctgaatcgcacatttccatcggaaccagacattttgtagaaagacatgggtttccgctcggaatctgaaggcagcacgcatgatatccgttatatgtgatgtggtacgtattggcaggacaggtatgaccccctaaaacctgttttaagttctctctttggattttttttagatttttcataatgttttgttttatagtagtttgtaataagtccctaagatatgaaaaatatttaaaatgatattttttaataaatttcaaaaaataattttcttcggtgtaaccttttccgtttttaattgtcttactaatagaaacaaataattatgaagcttctgtttggaaataaaaaagatgatttgctgagccgcctcaaaaggcaggaaccggcagcgcagaaagttttttatgatcagaatgtaaagaaatttctgagcatcagcagaagttacgttacagatttgtatcaggctgaagattgtgtaataaaagcgttctgtaaaatttttaaaagtattgagacctttagaaatgacggaagttttgaaggctgggcaagaagaattgtggtgaacgaatgtctgaactttattaaaagccgcaaaactgttttttatctggacgacatcaaccagtcttatctggaagaaatttatgaagaggatattgcttttgatttcaatgcacaggaacttttggatcagcttccggatgcttacaggatggtttttaacctctatgttctcgaagattattcgcatcaggaaattgcagatactttgcagatttcagttgccgtaagtaagacacaactgtttcgggcaaaggaaaaaatgagaaaaatttactttcaacaacaaaaagcactgaaaaatgaacactactaaaaataatatagaacatcatatcaaaaagcagatttctgaaagagaaattgctccttcgagaaatttatggtctgaaattgaagcccagtcagaacgaagaaactcaaaaacaaaaataaattggtatttggtggcggcttgtctggttttaacgttcagtttgggagcagttctgttttttaataaagaaagcaaaggaaccgaaaaatctgaaataattgctgaaattaaaaattcagatattcagaataaaactcagaaacaaacagtacagtctcctgaaacttcagatcagaaacagaaagaatcttttgcggcagaaaatattaaggctgaaaaaaagaatgaagcagtaaagtcacaaattattgttgagcaaaaacaaatgcctttaacaaaagaaaatgctccggaaattatcggtactgtttctaaaattgaacctgaaaaaatcatggcaaagtcagattctgcaaaaactcagaggaaaagaaaaagatatgttgatccttccacattactgttctcggtagagcataaagatgttatcatgaaaaccaaagaaagcaatgtcgccacaatcgatctgaacggaaaataatacttcaaattttaacaaataaaaaataatactatgattaaaaaaatgatcaagatgggactattgtgccttttatcaggtacagcctattctcagaaaaatcttaccctaaaccttcagtctaaagaagatacagaagtaagcccgattgtaaaagaaaaagtagatgaatatgcccgaaaaattgattcgattattcaggaagaaaaaaagctgatggaagcagaactgctgattcttcaggctaagaatcttgataaagctgaattcgacaaacaaaaggcgcttgttgccgaccgcttttcggaaaaaattgatcagcgaattgaagaacttggttttgatctggattctgtgattcaaaagcaggtaagatattctcttctgaattctgatgtgacttccaacgaagagattaaagaaaaacttctaaagaaattccgtccgacgaagaacttcaccgcctatttttcttacggagccatgattctcaccaacaataaagcagataatgatctggataaaaacttaggatacgcgggaaatcttgaatttgggttgaaattcaattatcagttcagcagaaccagtcattggggattaatttccgggcttggattttcatggagaaccttaaacattgataataacaggttttttgccaaagacatgaattcggatgtttatctttcggcttatgataaaaatttaagcaaaagcaaattgcgaacaggctacgtcatcgttcctttggggttgcagtataatttttctaaactgaaaagtgcaggaatggatatccagtacagagattatcagaaaggctttaaagtaggcgcaaatgtttatggaggagtaagaatgtcgacaaacaacattattaaaggcgaagaaatcagccagagagaaagagggaattatcaggtaaatcctttcatttacggagcgcagtttaccgtttcgtatagcgatttcagcattttcgtgaagaaagatttcggtaattttttcaaggataatcaatttgaaaatgataaagctctggttataggtcttgcttacaaatggtaaaaacacgtaacatttatatataacaggaaaccgcaggacaaatttgtcctgcggttttttataatatttaacaatttaattcttagtttatttcaggcttcccaccatatcttcaggttttacccactcgtcaaattgttcggcggttaaaagtcccagattcaccgcttcttcttttaaggtagttccgtttttatgggcggttttggcaatttttgcagcattttcataaccaatgtgcgtgttcaaagccgttaccagcatcagagatttatcaaccagttctttaattctttcatagttcggttcaattccgaccgcacagtgatcgttaaaggaaatacatgcatcggcaatcagttgggcggactgtaaaaaattataagccattacaggtttgaaaacattcagttcataatttccctgcgttcctgcaaaagaaatagtcgtgtcatttcctaaaacctgagcgcaaaccatggtcattgcttcattttgggtaggattaacttttcccggcataatagatgatcccggttcattttccggaatatgaatttctccaattcccgaacgaggtccggaagctaataatcggatatcctgagcaattttaaacaaagaaacggctaattgttttaaagctccgtgagattctacaatcgcgtcatgagctgccaaagcctcaaatttattttctgcggttacaaaaggaagatccgtaaatttcgaaatatattccgccacttttagatcataaccttgaggagtgtttaatcctgttcctaccgcggttccgcctaaagccagctcagaaagatgaggtaaagtatttttcagtgctttcaaaccataatttaactgagcgacataccctgagaattcctgacctaacgttaaaggcgttgcgtccatcaaatgtgttcttccgatctttacaatatctttaaacgcttctgatttttcttttaaagtgtctcttagtttttcgacagccggaatggtagtttccaccacttttttataagtcgcgatgtgcatcgccgttggataagtatcgttggaagattgcgatttattcacatcgtcattcgcatggatttcagatttttcgcctaaatttccaccattgttaacgtgtgctttattggaaatcacttcatttatattcatattcgactgcgttccggaaccggtttgccagatcactaaaggaaactgatcgttaagttttccttctaaaatttcatcacagactttcgcaatcatatctctcttttcagcaggaagaactcctaaatctgtattggtaaatgcagccgcttttttaagataagcaaacgcttcgatgatttcatgtggcatggaaccttccggaccaatcttaaaattatttcttgaacgctccgtttgggctccccaaaacttgtctgcgggaacctgcacttctcccatcgtgtctttttctattctgtaattcatgtgattgaaatttgtttagttttgatttaaccccaaaagcacaaagaattattaaattttaaaaaatcaaatttcgcaaaatgaaaatcgaagatttttaaaactaatgtgttcttctaaagcattatttattaaacttaaaataactaaagtgtttaaaagcttttgcgtcttttgtggttaaaatatcttcgtataaagttaatgagaaaagaaaaccctcgcaatttataatcattataaatatcaatctaagttactgattttactcatgcttttttgagtaagccgtatttttgcacccaaagaaaaaagtaaaatggatttcagatatcaggatccgtatccaattctaaaggatgatacggtatacaaaaaattgacttcagactacgtaaaagttgaaaaattaggagacagagaaattttaaccattgatccgaaagggcttgagcttttggcggaagaagcaatggcggatgtttctttcatgcttcgttcttcgcatcttgaaagtttaagaagaattattgatgatccagaagctacggacaacgacagatttgtggcttataatttattacagaatgcagcggttgctgtggaaggagctttaccttcgtgtcaggataccggaactgcaattgtgatgggtaaaaagggagaaaacgtttttacaggcgtagatgacggagaatatttaagcaaaggaatctacaatacttaccaaaaaagaaatttaagatattctcaggtggttcctttaacgatgtttgatgagaaaaattcaggttccaatcttccggcacagatcgatatttacgctaaaaaaggagattattacgaattcttatttttaacaaaaggaggaggttcggcaaacaagaccttcttgtatcaaaagacaaaatctttgctgaacgaaaaatctctggaagaattcattaaagagaaaatttcagatttaggaacggctgcttgtccgccttatcatttggctttggtaattggcggaacttctgcggaagccaatttgacggcggttaaaaaagcatcagcaaaatattatgacaatcttccgacagaaggaaatgaagcaggacaggcgttcagagacttggagtgggaagcaaaagttcagaaaatctgtcaggaaagtgctatcggagcacagtttggcggaaaatatttaacgcacgatgtgagagtaatcagattgcctcgtcacgccgcttcctgtccggttggaatgggagtttcctgttcagcagaccgaaatatcaaaggaaaaattacgaaagacggaattttcttagagcaactggagcaggatccgaagagatttttaccggcaacaccgccacatctggaagaagcagtagaaatcaacctgaatcagccgatgtctgatattttagcagaactttcaaaatatccgatcaaaacgagactgaagctgaacggtactttaattgtagccagagatattgcccacgcaaagatcaaagaattactggatgcaggacagccaatgcctgaatatttcaaaaatcacccgatttattacgcaggacctgcaaaaactccggaaggaatggcttcaggaagtttcggacctacaacggcgggaagaatggacgtttatgtagatgaattccagagccacggcggaagtatgattatgctggcaaaaggaaacagaacaaaagacgttaccaatgcctgcaacaaatatggaggtttttatttaggttccatcggaggaccggccgctattttagcgaaagataacattctttctgttgaggtggtagattttccggaattaggaatggaagctgtaagaaaaattgaagtgaaagatttcccggcgttcatcattacggatgataaaggaaatgatttctttgcagatcttgcgcactaaaattagttcataaataattactactttgtattgcatggtactttatttaaagttatctttgcaatacaaaatagtattatgaaaaattttttacttacatttatatttagtacaactgttttcagtatatcttttgctcagacggatgctaagattgacagtttgatacaaaaagagtttaaagattcagatgctcccggcggtgtttttctggtctctaaaaaaggagaaattatctatgagaaagcatttggtaagtctaatttggaactgaatacggatatgactgtccaaaatgtattccagataggctctatgaccaagcagtttacagctttttctattttacttttagaatccagaggtaaattaaatataaaagatcctatttctaagtatattcccgattatcctaatggaaagtctatcaccattcatcatttgcttacccacacttctggagtcaaagattttacgaaaatgaaatcaatctcagaaatcgcacaaaaggaaatgactcccaaaatgatgattgatttttttaaaaatgaacctgttgattttagtcccggagaaaagtttgattataataattccggttatgtattgcttggatatttaattgagttagtttccggagaaacatatgaagatttcgtgaagaaaaatatttttgaaaaaattgggatgaacaactctttttatgctacagacagaaagataatcaaaaacagagcttatggatatcatgaaaagaaagatgggtttgtaaacaagacaattatcaactacagtgttccattcgcttccggatctttaatgtcaaccgttgaagatatgctgaaatggcaagatgctattaatcgatatgccattcttgatgaaatacatactaaaaaactttatacaaaaaataaactaaacagcggagaagagtttacctatggatatggatggcatttaaaagacatcaacggaactcctacaagagagcatggtggcagcattttcggattcaaatctatgggagtatatattcccgatgcagatatatatgtattaggattcagcaattgcgactgtcattccccaacacagattacaaaagatatcgctcaattagttttaaatagtcaaattagcagcgtgaagtaatggtataatagtttaaaatcaaaataaataataaaataggatgtatatcttttgtgtaaaaaaataaaaagtcctatttttgcctaaaatctttaagaaaatgataacgattttatcagcattttggccgttttaccaattcctttggacaattttcttcattacaatgttccttgtaggattttggtgtatctttatgttcttcgggttggtaattccaatgtggttgacagaaggtttgaaagaatatttcggaaaaattaaacctttcaatccggaagatatcagaagcaagcagctaaacgagcaggaaggagtagaagtaatctacagcaatcctaaaggaaacgggcctttcttacacgatagtcacggacacggacatcattaattgattgtcattgttttctcacctgaattctgagaaagcaatatcaaagcaaaacaacatatataaaccgcttattctttaagcggtttttttatttctatcattcaaacagttaagtgttattcaaagcatattatttaataagtgcaaagttctgtttttcaacaaaagttgatttttttttcgaaaaataaattactttagtattgaattaaccttaaaaggatgaattatatgaaaaaattctattccggtatattgttgtttatcttagccaatgtctttggtcagataagctatacaattacccctaatccgtttaatgaaacggatgcaataacattaaccgtgcccggaaatcagatcgatgaatcggcgtggggagtttcaaacaatgccatttatatctggacgtggtctctggataccaattatcagaacagtcaggattgcccgacaaatggcagttggaacaattccaatgaatctaatcgattaaattataatgctgcgacagacacttattcattatcttttacgcccacaactttttatgcaagaacaggcattggaagatttggatttttgctgaaagataaaaccggatcacaccagacaactccggatatttttgtaaacgtaggaattctgaatttaaccatgacaaatcctgctgcaaacagcttaacgtctgttccgacgggaaattccattaacatcacggctacaaccaatgtgaatgcaacttttcagcttaaagccaacggaacggttgtaaattctacttctgcggcttcaacttcgtattcttacaattacacggtaactggtgatgccaatatggaattgatcgcaacgcagggaggtaattcaaagagttctacctttattcttcaggttccgagaaatgtgatttctgaagcaattccttcatggataagacaggggatcaattatcatccgacggataacacaaaagtaggattggctttgtatgctccgtctaaaaatttcgttcatgtgatcggaagttttaataactgggcagtaaatgatgcttatttgatgaaaagagatacaaccaatccggatttatactggatcgaactgagtggattaacgcctcagcaattgtatactttccagtacagaaccaatgatttaagaaaagtggcagatccgtattctccacagattctttcttcttatgacgatcagtacatttcttctacaacttatccgaatttaccggcatttcctgccggacaaggctttgaagtttctatgtttaaaacagggcaggctccttataactggcaggttacaaactttcagcgtccggcaaaagaaaatcttgtggtgtatgaattgctgttaagagactttacacaggaaaaaaactggcagtctttaattaataagatttcataccttaaaaatctgaacattaatgcaattgaattacttcctatcatggagttcgaaggaaatctttcatgggggtacaatacttctttccattatgcattagacaaagcatacggaacaccggaaaaattcaaagaatttattgatctgtgtcaccagaatggaattgctgtaattctggatattgcttttaatcatgcaaccgggcgctctccgctcgcaagactctggaatattgatccggatggagacggttatggagacatcgctgccaataatccttacttcaatcaggttcctaaacattcttataatgtattcaatgattttaaccatacaagtacttcaacgaaatattacgttgagagatgtcttcagcaatggttaacggaatatcatgtagatggtttccgttgggatttaacaaaaggattcacgcaaagctgttctgaaaacgacgaaacctgtacaaacgcttatcagcaggacagagtagatatcctgaaatactatgcagacaaacaatgggctcttgatccgaattcttacatgatttttgaacatttgggaactgatgccgaagaacagcagtgggcaaactacagagttgcagaaggaaaaggagtaatgatgtggaataaccagaacggatcttataaccagaatacaatgggctataaagagaacagtaatttcgacagaatgaatcatacgctgcatggattctctgaaatgagagcggtaggttatggagaaagtcatgatgaagaaagattaatgtttaaaaatcttgcttatggtgcggtaaacggaagttatgatgttaaaaaccttaatacagctttagacagaatgaaagccttcggagcaacgttcttcactattcccggtccgaaaatgatctggcagttcggagaacttggatacgaattcagtattaacagatgtacaaacggaaccattaataacggttgcagaaccgatgaaaagccgattgcatttactttaggatatgatacagatgtgaacagaaaagcggtttatgatacctgggcgaagattatcaatttcagaaatatttatccggttttcaagtcaaaaacatatactgtagaatccaataatctggcaaacgatccgaatggattaattacgagaatttacgtttacgacaacgcaattacgaacggagtgaaaaatgtagtggtgttagcaaattacacaacggcagctcaaagcgtggttccgtatttcccgtatgtaggtcagtggctgaatctaatggataactctgtttctaatgtaacatctacaacagctccgataactcttcagccgggagaattcagaattttcggtaattatgtgggaagtttatccacaacagacgtgaatgccgaaaataagctttctttaaagattgcggataaccctgtgaaaaatggggtggctaaattaatttaccacaaagcgaagaacggagagatttttatctacgatatgagcggtaaaaaaatggattcatttaaattgaataatgaaaacggaacgtacgaattaaaaacaaattatcctgcaggagcgtatttggttcatttaaaatcagatacaggaatttcaattcagaaaatgatggtaaaatagcctgtggataacttcaaaagtttatatggagagatcgcgaaagcggtctcttttttttgtttatttatactttatccgcagtgaaaacagggtttgttaatacgatactaacggcttttcaatactttattcacaattttttccacactaaaataggaggttgtccatatcatattcatactttaccaataggttattcatattttactcacaattgaaaaattatttatctacaattaatttttgcataccaacatgaaattaatatgttcctaatacataattcacgcgttatccacatcttattcacaattttggcagctctgaaaaattcaaattctaaattggtttgcagattaaaaattattagtctacttttgcagtagatttatcaagaaaggtggagggatttggccctgagaaaccttagcaaccgacattttctgatgaaaaggtgctaattccaacccgattgggggaagataagtgattctgtattccgtatgaataccagcttcttgaaggtctttttgtttgtttctgcaaacattttaaactaaattttttaaagcactgaaaagaatgaagaagctcagcgtaagcgtattccttttggcggtaggatttttatcggcacaggaaaaagaacagcagatagaagatgtcgtaattgtaggaaaccgaaatgcaaaacgcacaaaactggaaacaccggttccggtagacatcatcaacatcgaaaaaatacagcagtcttcaccgcaaattaccgttcaggatttactgaattatgttatcccgtctttcaactcagtccggcagtcggcttcagacggtacagaacatatcgatcctgttactttgagaggaatgggacccgatcaggttctggttctcgttaacggaaaaagaagacatactacttctttagttaattatcagaatacagtcggaaacggctctgtaggaacagacttaagcaccattccggtaatcgcaatcgacagaattgaagttctgagagacggtgcagcagcacaatacggttctgatgccattgcaggagtcatcaatattattcttaaaaaaaatatcggcggaacagccagccttaattacggaatttccggaagaaatgatggtgaaacgtatcaggcagcagcgaactacggaacttctttagggaaaaaagacggctatatcagtttatccctgcaattaaaccaaagaggaaaaacaacaagaacgcagaatcataatttggatatttacggcgataatttcgcgtatgattttgctccggattttaatgctgcaaaagcgctggacgatcagaaaattcttgccaatggtttaacccgggacgattttaacttccagatcggtgatgcaaaaataaagcaggcacagttatttttcaattccgaatatcctttgaacgatcagtttaaaatatattcctttggaggtttcagtatcaaagaaggacagggttacggtttcagaagattgccgagcgaaacttcaaacaatgtctattctatttatccgaacggttttcagccgactttaggctcgaaaatctatgacatttcctatgcaatcggtgcaaaatataataaaaacgattggttttttgatcttagcaatacattcggaagcaatacatttaattatgatgtaagcaacaccgtcaatgcatctttaggagccaattcaccaacggatttttatgcaggagcacacagttttcttcagaatacaattaatcttgatgtttcaaaaaacatcaggaacttcaatatcgcattcggtggagaattcaggtttgagcagtacgacatcaaagcaggagatcagacttcctatatgagatatgatgttttcggaaatcctgtgacggcgactaccaatccggataatatctccggagcaggaggagcgcagtcgtttattggattttcaccacagaatgcactttcaaaatccagacattctacagcggtttatgccgatgtttcttatgatctggataaaaaattaaatgtagaccttgccggaagattcgaaaactattcagattttggaagtacacttaacggaaaattagcggtaaggtacgaatttgtaaaaaattattcaatccgtgctgcggtgggaacaggcttcagagcaccatctcttcagcagcagtattttaacaattcttatgcagatatttccactacaggaaattcaattgttaccaaaggaatttttaacaacgacagcgaagctgcaaaagcacttggtttcgacaaattaaaacaggaaacttcggtgaacggaagcgttggatttactttaaagccgatcaataagctgtcaatcactttagacggatatttaattaaagtgaaagaccggatcgtgattacaagtaatattacagacgatcgactggcggtgtatggtgtggaaagtggaagattttttgccaatgccgttgatacggaaaccaaaggagtagatctggtagttgcttacgactggaaaattggaggaggcaatttaaacatcaatcttgccggaaattataccgaaacaaaaattacagatttccatttccctgctaatcttcagacaccgcagaatgaatttttcggaccggatcagatcaatatcatcgaaagtttatcacccaaaaccaaagcttctttaggactgaattacggaatcggaaaatttaattttctggtgagaaatacttacttcgggaaagtaatccgcgacggatatccgtttggaggagttcaggaatttaatccgaaagtagtaaccgatgtgagtgtaggatatgatttcacaaaaaatattaacttaaccgtcggagccaataatgtgtttgatgtctttccggatctgcagatttatgaaaattcgtattttggggttttcaaatatgctccggtgcagatgggaactctcggaaactatttcttcggaaggcttaattttacattttaattaatgaattcaacttcacaccagatcggctggaaaaccgcagtggcaattgttgtttcgaatatgatcggaaccggaattttcacaacactcggttttcagcttaccgacattacgaatgcttacagcatattcctcctttgtttcattggaggaattcttgctttgttcggagccttttgctatgccgaattaggttcccatttcaaagggaacggcggagattttatttatctgaaagaaacctatcacccgcttctaggctatctcgtgagctggatttccctcattatcgggttttcctctcccgttgcattggcagctttggcgatgtcgaaatacctttctgctttcgatgtttcttttggaaacagctttgccatcggaattatctttctggtttccgtttttttgtcattcagcttacaggcttcaagcagatttcataacttttttacactgataaaaattgcgttcatcattgttctcattatcatcggaatcggaatttcagactcagaaacaattgggaacagtctgaaattagatgattcatggcagaaagaaatcatgcttcctgcttttgccacttctctggtttttgtaacgtattcttacaccggttggaattctgcttcctacattgccggagaaataaaagatgttcagaaaaacctaccaaaatcactcattgtaggaactgttttcgtaaccgtttgttatctcttggtcaattttatcatgctgaagcatgctccagtagatcagttggcgggaaaagaagatgtaatgggagaagctgccaataatatgctgggaaatactttcggtaaaatagttaatatttttattgctttacagttagtcgccaccatcagtggttatttgtgggtaggttcccgtttgacacaggcttttgcaaaagaaaacagactctggaaatctctatcggtcggaaataaaaaaggaattcctgtccgtgcgatttttgcccatgccgtgattgcaacgttgattattttaacgggaagttttaaagagatttttgtttataccgcttttattctgcagttatttgccagtctggcaatttcaacggtgtattttataaaaaaggaagatcggaaaatatttaaatccaatcttttttatatttttccgacggtttttttgttattcagcatctacattctttatttcacgttgatccataatcctaaagaaagcatcatcggcttaggaattgttgcggtgggaattgttttgtatttaattgatagaaaattatcccgctgatttaaattaatcgtaaaacaatcaaaaattgtttttaacgcagggttcgcaaggataattgaactagctttgaaaaaaatccgttcgcaagggcgtttcactcagcaaatgatagcagaattatatttttaaaatcattttgaggcgccttaatttcaacaagctattacgtaagaaatcatttacacatttttatcacttgctgagtgaaaagcccttgcgaccgaaaagtaattgcaatcattttaaaagaaaaaccctgcgaacattgcgctaaaaattgaaccattaagaatattatttgaacttttaaattttggcgttaaatcattacaattacatgttgtttttaacgcagggttcgcaaggataattgaacctgctttgaaaaaaactccgctcgcaagggcgtttcactcagcaagtggtagcagaattatatttttgaaatcatttgaggcactttaatttcaagaagttattacgtaagaaatcatttatacatttttatcattcgctgagtgaaacgcctttgcgaccgaaatcaacatcatcatttaaaaagaaatcttctgcggacattgcgctaaaaaattgaaccattaagattatttaagaagttaagttttgtgaagattatttgaacttatgatttgtaaatcttggctttaaattattacaatcaattattgtttttaacgcagagttcgcaaggataatggaaccagctttgagaaaaatcgttcgcaagggcgtttcactcagcaagtggtagcagaattatatttttgaaatcatttgaggcactttaatttcaagaagttattacgtaagaatcatttatacattttttatcacttgctgagtgaaacgcctttgtgaccgaaatcaacatcatcattttaaaagaaaaatcctgcggacattgcgcttaaaaaaacaataaactcaaagactcttccgaacattgcgttaaaaaaagattcttcaataggcatacgcttcattcagaacaacaaactattagttttaaaattgaattaataatccgtatctttgcacccacaaaattttcataatgtctaaatcattaattccaaaattagaagctataaaacagagatataatgaggtggcagaccttattatacagcctgatgttatttcagaccaaaaaagatattcttctttgaacaaagaatatagcgatttggggaaaattgtaaaagtttacgatcaatataaaggagcgttggatacgattgaagagtccgacgaaattattgctgacggatccgataaagatttcgtggaactggcaaaaatcgaaaaaaacgaagcgctggaaaaaattccgggactggaggaagaattaaaagtactattaattcctaaagatcctgcagatgacaaaaacgttatcgtggaacttcgtgccggaacaggaggtgatgaagcagccatcttcgtggaagacatttacagaatgtactccatgtacttcaagacgaaaggatggagacatgaggttacagattccaacgaagcggcgaaaggatataaagaactcatcatgaaagtggaaggagaaggcgtgtacggaatcatgaaattcgaatccggagttcaccgtgtacagcgtgttcctgaaacagaatctcagggacgagttcacacttctgccattaccattgcagttcttccggaagctgaagaagtggatgtggaaattaatccggcagatatcgaaatgcagacttcgcgttccggtggagcaggaggacagaacgttaacaaggtagaaaccaaagttcagcttacgcacaaaccttcaggattggtggtggtttgtcagcaggctcgttcccagttagccaaccgtgaactggcgatggaaatgcttcgtgcaaaattgtacgacatcaaattgcaggaagttcagggagatattgcagcacagagaaagacaatggtttctacgggagaccgttctgcaaagatcaaaacatacaattatcctcagggaagagttacagatcacagaatcaacaaatccatgtataacttagatgcatacatgaacggagatatttccgaaatgatcgatgccgttatcatggcagaaaacgccgaaaaaatgaaaggcgaagaagaaagtttataaaatctttaccataaaatcttttgtaagtctccggagtatttccggagacttttattttgagcttaattcattgtttgaattatgtggtgtttaaatgtttttaaatcaattgattatgttgttttgtaaatgcttgtttaaaataattttaaaaaaaagggtttcatggtataattaatgtatttttacgtcaactcttgatcattcaggagtttttttatacactaaaattgaaaaatgtaacgtacttatgaaaaaacttcacattgcctttctggcaatacttctcttttgctttcaaagcttaaaatcccaaaatattctaaagcctgaaagtgtttttaatctttattttaattctttcgttaaatatgatgatgaatctgtaaaagaactcaacagttatcttattaattttctgggaaaagaaagtacccacaaaatgaaacttaaagacacctacaacgaaaagattgatgattataccagactttttcttgccggtcttcctgcaaatgtggcatctgaatgttcggttgaggtcaaaaattatttcagcgctttaatgcagaattttgccgatacgaaatacaggataaaagaaattaaaaccctaaatgatgaaagatttaaaggaaacggattctctgaagttacatacgaagcaagttttaaagtgccttctcataatctgatgcttaatatgggtgatattaaaaaaataggtgcaggagaaatgaagaaataccttattgatgttaccaatcagttaaaaaaagcagacaaaatcgtttccacagaacagaaattcaacctttatcagattaaggttgatgacgccatttactactggaacggaggtccacaggaattaaactggaagttaaatgaattttatctgagaaatttcaattaaaaattaaggctgtcttttagacggctttttttatttaaaacagattccttatttttggggaaatagcttaatatgaaaatcacacccattttattaacagccggagttcttttttcggcaacattttattcacaaaaaatgaattatccaaaagcagttaaaggaacacaaaccgatacctatttcggaactgccgttgcagatccgtaccgggatttggagaatgattctgaagccaccagaaagtgggtagatgatgaggtaaaacacagtcaggattatctttctaaaattcctttcagagacgaaatcaagaatcagttaagagacatctggaattatgaaaaaatttcggcacctttcaaagaaggagaatatacctattattataaaaatgacggattgcaggcgcagtctgtattgtacagaacgaacaataaaacaaaggcaacggaagtttttctggatcccaataaattttcggaaaaaggaaccacttcactttcccagctttctttcagcaaaaaaggaaatttggctgcgtattctatttcggaaggaggaagcgactggaacaaaatcatcattatcgatgcaattacaaaaaagcagattgatgaaactttggttgatgtaaaattcagcggaatttcatggcagggtgatgaaggtttctattattccagttacgacaaaccaaaagaaggaaccgtactttccggaatgacggataaacacaaagtgtattttcataaactgggaaccaaacaatccgatgatcagttgatttttggcggagacaaaacgccgagaagatatttaggagcgggagtttccgaagatcaaagatatctgattatttctgcagccaacgcaaccaacggaaatgaactgtatattaaagatctgaaaaacggcggcgattttgttcagattaataaaggttttgatatcaatgtaagcattgttgatacgcagggcgatgatctttatatttttacggataaagatgctccgaatatgcgtctggtaaaaacttccatcaaaaatccggctcccgaaacatggacagatgttattccccagaccgaaaatgttttaggaattacaacagggggaggatatttcttcgcaacttacatgattgatgccattgatcaggtaaaacagtacgacagaaccggaaaactgatccgtgaaatttcccttcccggaaaaggaaatgtttccggatttggaggcaaggaaacagaaaaagagctgtatttttcatttgccaattacatcactcccggaacgacgtataaatttaatgcagactcaggaaaatcggaagtgtatcagaagccaaaagtgaaattcaatccggaagattatgtttctgaacaggttttctacaattcaaaagacggaactaaaattccgatgatgatcaattacaaaaaagggacaaagcttaacggtaaaaatcctacgattctttattcctatggaggattcaacatcagcttacagcccgctttctctgttgtaaatgcaatctggatggaaaacggcggaatctatgccgttccgaacattcgcggtggcggagaatatggtaaaaaatggcatgatgcaggaacgaagatgcagaagaaaaatgtttttgaagatttcatcgcggcaggagaatatttacagagtaaaggctatacttccaaacagttcatggcactttcaggaagatcaaacggcggtttgctggtaggagctactatgacgatgcgtccggatttagccagggttgcctttccgggagtgggcgttctggatatgttgaggtataataaattcactgcaggagcaggctggtcttatgattacggaactgcggaagacaacaaagaaatgtttgactatttaaaatcttattctccggttcataatgtaaaagcaggaacgtgttatccatcaaccatgattattaccagtgatcatgacgacagggtagttccggcacattcttttaagtttggtgcagaattacaggaaaaacaggcttgtaacaacccgattttactaagaattgagaaaaatgcaggacatggagccggaagatctacagaacaggtgatcggagaaaatgcagatctgatttcttttgcgctgtatgaaatggggattaaaaacctgaaaaaataatcaaaatgttaaaaatggctgatatattaaatgttagccattttttttgtaattttccattcaagttatatttgtttagaatatttaaaaatattaattggctattatgaaaaaaagaattttactggtttgtgcattagcgggtatggctacctctgcttatgcacaaagatgggagccatcttctcagaaagtttctgaaattagaaaagaagttgaagtgaagtatgcttacaaagtagacttaccaacacttagaaaccttttgaaagatgctgttgagacaggaaatggagcaaaacctgttattatttctttaccgactgtagagggtaaagttgaaaagtttgcggtatatagcaatcctgttatggaaaaatccatggcagatacatatgggcttggatcttacgtaggtgtaggagtggatgatccttcaaaatatcttagattcagtacatcgcctactgaaatccagacaatgattattaaagatggtgtatttcagtttatagaacctattactaaggataaaaaaacatacggcgttttttataaatccaagagaacacagagcgaccaaggatttgaatgtggtacagaagaaaaaaatatcaaggatattaaatctcttttagaaaacggaaaaaaaaatctttctagtgtaggaattacaaacagaccttctattacaaaatacagaacgtatcgtttggcgctttctacaacgggagaatatacaaaactgtttgatccttcaggaggaattacaaatacagtaacccaaatgaatgcaacaatgacccgtgtgaatggtgttttcgaaaaagaatttggtataaaattacttgtccagaatttaccgggaattatttatacagatccaacgacagatccttataccggtaatttaaatttaaatttacaacaaaccctaacttcccaagttgggaatgcaaattatgacatcggtcacgttttcaatgctgccggaggaaatgggaatgcaggctgtataggatgtatttgtacaaatcctgcaacaagcactactttagcaaaaggatcagcattcactcaaaatacaaatcctgtaggagatacatttgatatagattatgtagcccacgaaatggggcatcagcttggaggaaaccatacgttttctaatattacggaaggaacggctgtaaatgttgaacccggaggaggaacaactattatggcatatgcgggaattactccagataacgttcaattgaattctgatgcgtattttcactattcatcaattgatcagattctaacaaatcttgatagcaaaagtgcttgtggtacggaacagacgatcactacaaacaccgctccggttattgcacctcttactgcttacaccattcctaagggaacagcttattatttggaagcttcagctaccgatgcgcaaaatgatatattcaaatacaattgggagcagtatgatactgtaggaacaaccaattctatttccggagacagcggatggggattcaatccggtgggagcattaacaagatcatactttggaacaaccagcggaagaagatatttccctaaattatctactgtaatggcaggtaatttaattaataaaactgattgggaaacagtatcttatattccccgagttttaaaatacgcagttactgtaagagacgaaaacccggtaagaccaatggtttcttcttcagaaacaacagttacagtgggtaacgacgggccatttaaatttaatggaattactgatgctacagtactttacaacaacgcttcaaatacaatcttatgggatgcggtaaatacaaatgctgcaccatataatgtatcaaatgtaaagattgattatacaacggataatggaactacatggacagatttggttgcatcaacaccaaataccggaagttatacagggcaaatgcctgctagtttaactggtgctgttaaattaagaatttccgcaattggaaatgtattttatgcggtttctccacaaattacagtggcggctgcgccgacttctactacgaatgcgcctacaggtttgaaaacaagagatctggacgtactgagaacatcagctattgtaggatggaatgcagtacccggagcaacatattcagtaaactacagaaaagtaggcgatacaacctggatgacagcttcaagcagtgttaattcaatttctttaacgggccttgaagatgaaaccagctatgaagtaagagtttctgctgtggtaaataatgttcccggaactttatcaggagtttatactttcaaaacaaaaggtcttagaacaggatatgattattgtgtactgaacagtccgcttccttactttggagcaatagggcgtgttcagttggcgaatgttaattatgtagatgctactttcagatcttataaagatattactgaggttcctgccaatgtaattaatcttgtgaaaggaacagcatattctgtagcagtatatggtttgtctacttcagattatgttagtaatccgatgggactaaatgtctggatcgattataacagaaatggtgtattcgaagcttcagaaaaagttctttcaaacagtggtacgcctaatgctgcttccggtgtaagagcggtttctgctagctttacagttcctacaactgcttattcaggagataaaacgactttaatgagagttgcgggtaattttaatactcctcttacttcagcttgtggttctgtaagtccagcaggaggaacaatggacttcagagtgaagattaccgatacagttcttgctacggatgaagttaaaaataatgcagaatccgatatctctatatatccgaatccggcagaagactttgttggagtgaagaatataaaaggtaaagcagattacaaaatctacagtgccgatggaagactggtacttcagggagatcttagcaatcagattattaatgtatccagtttagtaaaaggggtatatgtaattgcgattaaaaatggggagaaatcttacagcactaagttaatcaagaagtaatattcttaacatagattcaaaataatccggataaactttatccggattatttttttattcagcattcccgaaaatataaaacaggatattaaatgataaaggatttaatgaaaaccgtacttctgtatatcctaatataatttacagacgcaagaatataacttacaggcgctaaaatattactttcagttgcaagaatgtaatttacagtaggaagaatataatttacagacgcaagaatataacttacaggggctaaaatattactttcagttgcaagaatgtaatttacagttggaagaatataacgtacagatatgaaaaccgccattgcagaagggaaatggtttttccccttcattaaatttcagaagaaggttttagcagttatttgtagtttgtacttatttctttaattgatattaaaaaattacgattagtgagtacataaaaagcaattttgcagttttgcagtttcgctttttttatttaaaaaatattccctcaaaaatgtgtaattttagccatctattaaatctgaaattatgagaagggcagttcagaataaaactcctcaattcactattaccgaaaagaaaacagaggtctatccttttgagaaagacggcttacagttaaaatcttcttatacggcagaagacgttaaaaatcaggaattaacgcagacttctccgggaattgcaccttatttaagaggtccgtattctacaatgtatgttcagaaaccatggacgatccgtcagtatgcgggtttttccacggcagaagaatccaatgctttttacagaagaaatctggcggcgggacaaaaaggtctttccgttgccttcgatctggcgacacacagaggatatgattccgatcacgcgagagttgtgggcgatgttggaaaagcgggagtagcgattgattctgtggaggatatgaagattttattcaatgaaatccctttggatcagatttcagtttccatgacgatgaacggagccgttctgccgattctttccttctatattgtggcggcagaagagcaaggcgtttctcaggatttgctttcaggaaccatccagaatgatattttgaaggaattcatggtgagaaatacctacatttatccgcctgcaccttccatgaagatcatagcagatattttcgaatatacttctcagaatattccgaagtttaattccatctcaatttccggttatcatatgcaggaagccggagccactccggttctggaaatggcttatacacttgcagatggtttagaatacctaagaacaggaataaaagcaggaatgaatgttgatgattttgcaccgagactctcatttttttgggcaatcgggatgaatcacttcatggaaattgcaaagatgagggcagcaagatatatttgggcagaattattaaagcagtttaaccctcagaatccgaaatctttagctttaagaacccactcacagacttcaggatggtctttaacggaacaggagccttataataatattaccagaaccgcgattgaagcattatcttcagcgttgggcggaacacagtctcttcataccaatgctttggacgaagcgattgcacttcctacagattattcagcaaaaattgcaagaaatacacagattattcttcagcaggaaagcggaatctgcgatgtcgtagatccgatgggcggaagcaatctggttgaatctttaacgcagcaaatgattgaagaagcgatgaaatacatcgatgaggtagagcaggaaggtggaatgacaaaagccattgaagccggaattccaaagatgagaattgaagaagcggcagcgagaaaacaggcaaaaattgacagcggagaagaatttatcatcggggttaattctttcagatcagaattaaagcaggatgctattgaaattttagacatcgataacacggaagtccgcagaaagcagatcgaaagattaaataaaataaaggcagaaagaaatcccgaagcggtacatcagattttagatgaaatccgtgaaagtgccaaatctggaaaaggaaatcttttagccttatgtattgaagccgcaagaagaagagtaacgctgggcgaaatgagcgatgcgatggaagaaagcttcggaagatacaaagccaatatcagaacaatttcaggagtttatgccatgaacgcagggaaaaacgaatattttgaaaaagccttacatcttactcagaaatttgaggaggaagaagggcgccgtccacgattaatggttgccaaaatgggacaggacggtcacgacagaggagcaaaagtcgtagcaaccgcatttgcagatatgggatttgatgtggatgtggcaccattattccagactccggaagaagtcgcaaaacaggcggtagaaaatgacattcatatattaggagtttcttctttggcggcaggtcataaaactttggttccgcaggtggttgaagaacttaaaaaactcggggcagacgatattaccattgttgtaggaggggtaattcctcagcaggattacgaatttctctatgcaaacggtgccgatttcatttttggtccgggaaccaaccttccgaagtgtgcagtagatattctggataaatttttaaattaaattaaccttttcaccagataagttgcacagcttttgtactgtactccataatcaaaacaaaatattatggcttatacagtagtttccgtatttcctataacggtagatacagaagaaattaaaaaagatttaaaagaaaacggctttgatgaagcaaatatcattatttccagatcaaacctcgaaagcgggctttcaaccgacaattatcaggaagatgagcagaccaaaggatttttcgaatatacttttgcacatgacaatgatatgcttaatgcttacagaaagcacagcatcggaaaaaataatgtaattgtttatgccgataatctcgaacaggcagtttctgctaattcactactgaataaaaacggagctttgcaggtatatagaaagcctgcggaagaaaaaacagatatccctgaaggaatgacggaagaagaatataacggaattattgcaaaggcaagacacaatatttatttcttaggatcagaaagagtttaccattcaaacatcattaaaggaatggacgatccgatggatgatctgggatctaaagattaaatataaaaattaaaaaataagataggctgcttcagaaatgaggcagcctattttgctaaatattatatgaaaaaaaacaattagggtagcaaaactttatcaattgcatggataattccgttgctgcattgtacgtcggttacaataatattagaaactctgttgttgttatctgtaatcttagcaccgcctgttgtggtaatcttaaaacttccaccctggaaagttggaaccatcatattgtttgtaagattattagatcctacattggctccggtaacgacgtgatatttcaaggtattttccaaagtcgtttttggaatagctgctaaattagtcgctccgatttctgttagcaaagaagaaaatgctgtgttggtaggtgcaaaaaccgtaaacggagaattggcagttccgcttaaaattccaacaaaattcggcatatcacttcttgtaagagcagaaaccaaagacgtaaactgaggatttgccgttgcatgagtaacaatagttggcaaaccgattaccgcatctactttgtggatcactccgttgttggcatcaatatctgtggcaacaacattcgataccccattaatttttacaccgccattcgtattgataaacatactgatcggtcttgtggaagaagcagatcccatagcaagagtagaaacatagccggtagaaattgctgcagcttttacttcagaattcagaacgtgattcatcagcagagttttcagagcatctgtaggaacatcattaagacttgcatatccgtttgcttgcaaaaaagttgcaaaagcggcatttgttggggcgaatagtgtaaaagttccgctttggtttagagtagcagaaagacctgctttgtcaatggcagcttttaaactgcttaagttactgtctgaagaaaccagttcataagttgttttctcagtcatcatgttgtcgtcattgtcatcgcaggagataatactaagcatagcaactcctgaaaacagtagaggtttaatgaaatttctcataatattatttgttaagatgtaaaatcttataggcaaatattatacctttttatttattttagtaaaataaatttacttttttatcagtttatcttttagatcataaaaagagataggtgaaaaaaggagtttcgattaaaaaagaattacagatttaataaaaaaactaaaaaataattttgatattcagaaaaatgtatatatttgcaacgtaaaataaagtttaaccatttaaaacaacgaagcaatgttcatatccaatcagctttcaacagtaggattgccttttgcaaaggcgaggcttcgtggtttggtacactcttagaataacagtacaatgaaatatcacccgaagtcgtaagatttcgggttctttattgcgcaatatttcaaacccaaaacagtttccccgaaaatctttttttagaaattaggattttttcagatagcagatcattttttatttgaagctatttccagctttccgctgtatcttttttgttacgacctgcgcttcgctccggtcgccaaaaaaaaggatgccgctgcaatctgggctagaaaaatccattgaagaaaactcatagaaacctcattggtttttaaaacctatgaggtttagataaagtcagccaatattttgcctggcgaaatgtaatatgaagtttagaaaataaaatttctgaacctcacttctaatgctaaattaatggaaaaagataaccttctgcattcccggataagaactcttaggagcagaaaaagaatcataagaaaagatgtagaaaaacaaatacttaaaaaatataaacgtcatagagaagtctggaaattaagaaggaatattccgctcattccgctggaaaaaccttaccagaaaggatttgtgagattttttgtcgtaagagatgatgtaaaacgttctaaagacggcgatttcttcgaaaaccttttaaagaaaatcaatacggaaatgtactccgacacccgaaaatttctaaaaaagaaaagaaaatccggacgaagaatttacgtggaaaaagaacagaaaacggcaaacgttcttctctgggaatggaacaatccgacatttggtttaacggaacgcgaaaggcagtattttgtaaaaagagaatattacgctcataataatagactgattaaagaatattatgaattcattgagccgtggagatttgtattgagagtaaaaccgaatatcattacccactataaacctttagatgaggatttggaaagagagtataatgcattagactcctatttaaatcagcacaaagtaataggaattattcaaaaaaccatttatggaaaacccaataaatggagggataaatacaaaaggaaaactaacgtgagaaaatattttaattataggatctccgcagaagagctcgcagaaatatttacagacggagaattttaatttttcagataaatcattaaacaacaaaaagtaagcatgacctggaaagttgcagaaagaaaaataggaaaagcaggaaatataaaacagcagcagaaaaggcagcaggaatggaaccgtaaatatggcgaaaactggcagatcggatattttataaacaatgaatttgtagcacaggaagatgctttggaaaccatctactacaaaagttatgaagagcatttcgaaaatcatccgaatgatttacaggagcttattcatacagctaaagccttacggaatccacatgcagaaatgacgagaggaacagatttacagcttcctgcaatttataaatatttaaaaaacaaaaatcttacgcttttgggcaatgaaatggtagacataggaacctatggaagcagatcacacaaactcagtgtaagacttagtcctcttaccattaaagtaacaggaaatcccgatatgaccttagaaaaattctggcaagacaaaaaatgccttgtcatttgggaagacaattaaaacaaaaacaatgggaaatttaaaacttaaaggaaaagatatattaaaattaggctatccgaataaccagagtgtcaacatcgctttggaagtgatgaaaaggaactttgccacaaaaaacatccatcacgtcaaatctattctaaaagatattctggtgaatccggaaaattttgaaaaagatttaaccttcggacagattgctgaagctttgctttcatccaagaaaactgaaaagaggatgctcaatacacatcgggcgagattcaatattttcggaaacaatatttcagatgaagcaaaaaatcaattgtacaccgcgctcaagcttccaatttcaacacagggagctttgatgcccgatgcgcacagcggatacggacttccgatcggaggtgttctcgcggtagaaaatgccgtaattccttacggagtcgggatggatattggctgcagaatgagcctcagcattttggatacgcccatttcatatcttgaaggagcaagagacaaatacgaaaaagcgcttgctgaacataccaaattcggaatgtacgaaacacacaaatctcatgtcgaccatgaaattttcgacagagataccttcgatctcattccggttttgagaagattaaaaggaaaagccatcaaacaaatgggaacctccggcggcggaaaccactttgtggaattcggagaagttgaaattacggaagaagatgaacagatcggacttccgaaaggaaaatacctcggaattctttcgcacagcggttcgcgcggattgggagcagaaatcgcccagtattattccagagttgcgacagaacagtgtcctttaccaaaagaagctcaacaatttgcgtggctggatctgaacacccacctcggattagaatattggaccgcaatgaatcttgcaggagattacgcttcttcgtgtcatgacgatattcacagaagacttgtaaaagcagtcggaggaagagtaaaagcaaagatcgaaaaccatcacaattttgcatggaaagaaatccataacgggaaagaagtaatcgttcaccggaaaggagcaactccggcaaataaaaacgaattgggaatgattcccggttccatgacggcaaaaggattcatcgttcgtggaaaaggaaaccccgattctctgaattccgcttctcacggagccggaagagcccattcaagaggcgaatgcagaagcctttttactcaaaatgatattaaaaaagaattaaaattgaagaatgtcatcttaatgggcggaaatgcagaagaagcaccaatggcttacaaagacatcaacgaagtgatgaacgcgcaaagcgaactggtggatattctgggaactttccagccgagaatggtaagaatggataagtaaaatggttgttagtttttggttgatggttgttagaatttttaacgccatcaactgacaaccatcaaccgacaacaaaaaacaaaaaaaatgggagcaccacataatataaaaagatacggtgaagtctggccggaattcagaattcagagcggactcgaaattttagaaaaattaaaagataaaattattatttcaggaggttgggcgtggcattttatgtctgaaatcgggcatacggaatacaaacacgcgcacgaccataaggatattgatgtctttgtgaaaaaagaaaacgtagcagaagtagtgataatccttcaacaggaaggttttcagaaagtctggacaaggtacgatcatcttcagagcgaagagaatttccgaagatatgagaaaacggttgagctggaaaacggaaaattccacaggatcacaatcgatttctttgaaagaaatgatcttgaaactgttgaggctaacggatttaccgtcgtaaagcctgaagttttgctcacgttctacagaaacattcattccagcgataaatgttgggcagttatggctgcaaaagatttactggaaaaaaggattgatcctattggtcatccgaaattaagtgaaatgccgaaataaattaagatggaagacgagattaaaaaagaaatattcgaatttataaatcagaatctttctgataacagaaaattattaagagaaaaagcaaacgaatttttgaaaaaccctaatgtaaccaatttgtttttaaatgaatttgaaaaattaaatattgtcgtgcattttcagtctttgtcttcagagactgataaactttcgaaagaagaaatgggagacatttcagatgtttggaatttttatttaaatgaagatatcgatgaggtagataaaagtaaaggttatgaggattgggattttgatacatatttagaatcaggaaaacctcttcactgttgtaaggtttggattaattggtttttaaagctttattacatccaaaactttgaaataattagaaaaggagaatatgaaacagagcgagttttaataattgctgatctttatgaaaaagaaaaatacagttcaattttaaaaatattgaaacaaaacggttacgaagaagttacagatgaattggctctattaaaagcagagtctatttctacagattgtaatgatgatccgactgtttttgattgtctgttttcggatattattcatcccgctcattttagaaataattacacaaaatgaaaaaaatatacaaacaggaacatttcagatattacgaaaaccttctcgtagtctgtccggattgcggtgaagatgctgtcgtggaaaatgaacacaattataaacaggcagctctgaaatgcagacattgcgatttacagaagaatgcattagatcttttggtgtacaaagcttttgtcaatctttactgcccgatttgtgcacatcccattcgttatgagcaaggcaacttaaaagaaaagcctaaaatcagtaatataaaatgcgatgaatgtgattctcagtttcaaattcagccaaaaactgaaaagtatttgaattcttttcccaaagaagaaggtttaattcacgatcctgttttcggttgtccgtattattttcaggcagattttaaagggaaattattctgggcgagaaacagagagcatctgttggaaatggaaaattatgtttcatcagatttaagaacaagattatcttacagaatgcgaatggtagaaagattaccgacatttattaaagaagccaaaaacagagaggcaattttaaaaattttacaaaaatggaaaaactcatacaaataacctcaggaagaggacctttagaatgccaatgggtggtggcaaaagttctgaaacactttcttcaagaggcaaaagataacaatatagattacgaaattattcaccgtgaaaatggcgatgaaaatctcactttaaaatcggtgactttgcttttacagtcaaaaaatcttaatgaatttttagataattggttaggaagcatttgctggattgggaaaagcaccttccggaaattgcataaaagaagcaattggtttatcggcgtttttgaactggaaggattggagaaaatcaattttaatgaaaaggacattcagtttcagacaaccagaagtcagggaagcggcggacaaaatgtaaacaaagtgaatacggcagttcgcgcaacacacattccgacaggacaaagtgttttcgttcaggattcgcgttcacagttggaaaataaaaaactttcgattgaaagacttaaagcaaaagtgctagaacagaacatcattcagcttcaaaaaagaatgcaggaaacatggaacaatcatctaaatgtccaacgcggaaatccgatccgaactttttccggaaccgacttcaaaaagaattatgaagacaaatcgtttaaaaaacagagaagtcagctcaaaaatgaattaaaaaactacaaaaatgaccttaactaaaaataaatactattttgaggctttagacaactatccgtacagtttgccggagtgtctcgaagcattaaactatgcgttggcttatgatcctgaagacgcagacagtctttgtctcatgggaagaatatacagcgaaatgttatccgattatgaaaaggcaaagctgtactttgaagaagccatgcagtgtgacgtaacgaatcttaatacaccgcagtattatattaaatgtcttctggataatgaagattatcacgaagcagaaaaactgattgattattctttaaaaatcaagggaattgacaaagcaaccttatggttttacagagctttactttccgaaaaaagaggaagttttgccaatgctttgaaatttttagatgaatctgcaaaatactgttttacagaatacagcctgaatgtggtgaaagaccgaaagaaattcatcaaatcaaaaatgccgaagaaaaagaagatgaaaaaagcgaaggagacgaaataagtctcctttttaacataatatatttttttgacagccattcataaaaaatcttagatttgcttaaaatcaaccacatgaataaaaatatattttatataccactctctgtagcggtgatgttcgcttacagcacagtaaatgcacaaaattctaaatcactgattcaggattactataaaaaaaatgcacagcttactcagaaaaatagttttgataataagctcggatttattattcttaatgaagataattccaaaagtcttggagtaaatattgtaaatgtacagcagacttacaacggtcttcgtgtgtacaatgctttaggtaaagttctgataaaagatgaaaaaataatctctgaaaaaaatgatttcaaaaaagagattgttatcggaaatcagggaagttcaaaagaaagaattcccgaagaaacactgaagcaaaacttaaacctgcaggaaatattaaaaacagaatacctgccggacgtttattttgacaaaaataatgtattggtactggcaaaagagatttttgtttcggacaagaaatcttcagatgtatggcacgtaattgcagatgcttccaccggagaaatacttactaaagacaatcttacggtaagctgtaattttgatcataacgaaagcggtgaagagaattcttattcagaacctgtaaaatttacaacggaaagttcagattctcagaaaacgacttcattattggttccgtctaatgcctcttataatgtttttcctctaccagtagaagcaccaagtttcggatcccgctctgttgtaaacaatccttgggatctcactgcgtcaccagaaggatggcattctacaggtacagcaagctataccaatacaagaggaaataatgtgtacgcatactcggatcaggcaaatgcaaatacaccgggatattctccggacggcggagcttcaagaaattttgatttcacatatgcagaaggaagatacatcaatccttttacgcataaagatgcagccattaccaatcttttttatttaaataataagattcatgatgtattttataaatttggattcacagaatcggcaagaaattttcaaacaaataattttggaaacggaggaattagcggagatgcagtaaatgcagaagcgttcgacggaagcggactgaataacgccaatttcagttcaggatatgaaacggtaatcagcggaaccacttaccttcttgcgccaagaatgcagatgtatctttggtcaagagcacagacaagcgcagatcctatttcacgttatcagtataattctccctctaccgttgcaagtcgtccaaaagttttaacaggtacagcatcttttggtcgtttattgtttgaaggtcagtctgtaacaggagatctcgcagtttcttcaccggcggatgcatgtacacaacctgcagcaggaagtcttacaggaaaaattgctgttgtaaccagtactacctgcgaatacagccttaaagttctaaacgctcagaatgcaggtgcagtaggcgttattgtttatagaccaagtacagatacacccgcaacaatgggagccggaacctatggagatcaggttactatcccttcaattaatatggggaaaactgaaggcgaatttttagtagcacaggtttccggaggaaataccatcaacgcaactttgattaatgattttaacggatttaaacattcaagtttagataatggtgttgttattcatgaatacggtcatggaatttccaacagactgacgggacagggctacagttgtctgtcttctaccaactctaccgaacagatgggagaaggatggtcagactactttgcattgatgcttacgaccaggccgggagatacatcttctcttgcgagaggaatgggaacctatgttgcggaacaggcaacaacaggaaacggaatcagacctgcaaaatattcaccggactttacagtaaacggatatacgtataacaatactaattctatgactggaaatcctcactccataggatttgtatgggcttccatgctttgggatcttacgtggaaatatgtagagaaatatgggtataacagtgatgttttagccaatccgaattcgggaaatgccagaattttacaattggtaatggatgggctgaaacttcaggcctgcagtcctacatttattgacggaagagatgccattcttcaggcagatcaggttaaaacaggaggagcagacaaatgtatgatctggaaagcctttgctaaaagaggcttgggaacagcagcttctgccggaagcaaaaccgtaggaacagatcaggtagaaagttttacctatcctgcagaatgtgatattgtattggcaactcaggaagccggaaatgcagaaacaaaatatgtcgtttttccaaatcctacctatgatgaattctttgtaggaaatattgataagtccaaggaagacgttaaggtaaaacttttcgatatgtcagggaaattagtattctccgatacgcgtgaaaacacttccaaaaaggcattttcaaccagaggattacaaaaaggagtgtatatggtaaacatcagacagggtgaaaaaactcagacagaaaaactgattgttagataaattattcaatcaaataattttaagaaggaagtcatttaggcttccttttttgtacatttaataatggaattaagattcgaacgcagaccgttatatttaaaagaaacattttcaattgcttatggaaactatgataagagggaagccttgctcatagaattatctcatcataaatgcaaaggttacggagaatgtgtggcgatcgattattataagattgatcttcagagatttgttttacagttaaaagaaattcagtctcagattcaaaactgtacaattattcatccggaagaatttttcaagtatctgttgaatttaaatctgcatccgtttttactttccgcattagattgcgcgtattgggatctttttggaaaacttgaaaataaaagctttattgaattaaataaccttccatcagatcatttagttgaaagttccatcaccatttctgttggagaaattgatcatcagattgaaaaaatcgaaaaaagctcatggaataaattcaaagtaaaatgtaaaggcttaaataaaaatgatgttgaaaaactattacagttaaaccgaaatatcgctcttgattccaatgcaagttttactgatgaagattgtatatggcttcaggaaaatgctgaggttcagaagttttcctatctcgagcagccaagaccagtcgataattatcgaatcttagaaaaacaatcttttgcaaactggatggcagatgaagattgtcagaatttggattcattagacaaattaattctctattataaaagcatcaatatcaaattaatgaaatgtggcggattaacccctgctttagaaatgatcagaaaagcaagagcattgaattacaaaatcatgatcggctgtatgacggaatctaccgtgggaatttccgcagcctgtaatttaacaggaatggtagattatgccgatttggacggagctaatttaatttcaaatgactatgcgacaggaagtttcgttaaaaacggaaaaattagtttatcttcagaatcaggtttaggaattatgattaaataagagaacgataaatcgtcaatccgctttgcttatcagttttttctctcagtgctttcatttgctgagtgaaacgccattgcgaacgaaaaataaacagattagaaatcaaaaaactttgcgctttttgtgttaaaaatataaagaagaaccaaaaacaaaaatagacttcaaaagaagcctattttttgtttgctgaaatcagataatcataaaccatttgatgctgatcctccgataattttgctttcggagccattctgcttaatgtttttatccagccctgatcgtcgtgttttgcaggatccggcaatttgtggcatctgttgcaggaattttcgaagatggtttttccctgagccaattgttcggatgaggtatattttggtccggttaccgctacactttttggtccgcacgatacagcgactgctgcagaagctaacgtcatacctaaaatcagttttttcatattactatttttgttgtgatttatttttttacagacacgatataatcgtacacccactgatgctgctcatcggtaagttttgctttcggagccatagaattcataattccaacccattgaacagaagtgtgggaagccggatccggtaatttgtgacatcttccgcaagagttttcgaaaattgtttttccttgtgcaatttgttctgctgtagaagtcgaagctacaggagcagttgctgttgaagcttttggagtacaggatgccaataaaacggcagcaaatgatgctacagcgataagttttttcatgttttttaactgtttattcaaacaaatgtagtaatttaccgtttccattgctgaaatgaagtataatttagaagaaataaaaattagaataccaaacagaacgtttgttttcaatgcttaaatgtcaataattaaattctaaacattttatctgaagctttttcccgctttccgtactcgctatttccggttttcggcggcagcgaagctgccgccgaaaaccggaaatgagctcagacaaatactccaatcggggctagatgagagtttacttacaatgtttccgaccattgtaatcaaagacaaatctaaaaaactcaacttaaaaaattccgcaatccaatacattccctcttgaccgttcccgtttaattgtctatttttgaaacaatgaaattttctacagaagagctaatacaaggaataagatcgggaaataaacgcctgatcgcaaaagccataacattagtggaaagtaaaaaagccgagcacagaacacaggcagaagaacttctcaaacaaatcatgccttttaccggaaattcggttagagtaggagtaacaggtgttcccggagccggaaaatcgacttttatagaaaatttcggaagattggcgattgccaatggcaaaaaagtggcagttttagccatcgatccaagttcagccatcaataaaggaagcattttgggcgataaaacccgcatggaagaacttgccaaagaagaaaatgcatttatccgaccttccccgagttccggatttctgggcggagtggcgaatacaactttcgaaaccatgatgatatgcgaagcggcaggttacgattatattttaatagaaaccgttggagtagggcagtctgaagttttggttgccgatattacggatgtttttttattcttaaaaataattggcggaggcgacgaacttcagggcatcaaacgcggaattatggaaatggtggatgttattttcatcaataaagtcgatcaggacaaccttcaaaaagccaaaaatacaagactggaattaaaaagagccttagattttattccaccaaaagaaaaagactggaaagttcctgttttactggggtctgctttaagtaatgaaggtctgaacgatgtttttgaaaaaattaatgattttattaatcttaaaaagaaaaccaaccgtttcgaagaggtaagaatccaacaggcagaaaaacgttttgaatattgggttcaggaatatattctttctgtgatgaaaaaaaataattctgtggaagaagcatatcttttgcacaaaaaaaatgcttcagccatgatttcaaatccaagtaccgaagcaaaattatttgtggataaatttttgtctaaagaataattttaattaaagcttttctttctcctcttcatttttcgtaatatatccgtcatacgaaatcggctgtctgtcgttgcttctgatagaagtaaaagcctttccatttttgaaaacctccatattaatttcatcaacagaactttggtcatgcactttaatttttacgatccattttcccttttttccctgagactttgtcaccataaaatcttttgaagtaaatctgtaactgttttgggtcgtatttccgtaagtaggattaaaaactcttccgaaataaggcaatacaacctcaagcttatcttttctcagatcaatagaataattgcttcccgaaagatcaagaattctcgacgctgtagcgttgggaagagaacccatcacattaataacgtcgtaattggtgggcgtggctctttctgcatgaaacgagaagtcttcggaattcacaagtgctgttacagcggaaggatccgtagcggtttgagaagagcagttttggaagatcatcagaaatccaaaaacaaatataatcgaaatatactttttcataatactaaaataattgttaaatttatatagcaaattatatgcaaatatattgtttaaaattattttggaacaaaaattgtaaaggttgaacgtatacactcgcactatgaaaataaaacacatttttggaattggagccgttgccctgtcggttgctgcttgtactacaaacccaattacgggcagatcttctctgcagctggcaaataactcagaaattatgaccatgtctgctcaggaatacaaaacaacattaggaaaatctaaagtaatttccggaactgcagatgcgaaaagagtggtaagcgtaggttccagaataaaatctgctgccgaaagatattatcagcaaatcgggcgttctgcggatcttgcgaactacaattgggagtttaatcttcttcagagcaacgaacttaatgcatggtgtatgccgggcggaaaagttgctgtttatacaggaattttaccggttacaaaaaatgaaaatggtttagctgtggtaatgggacacgaagtttctcacgctttggcaggacacggaaacgaaagaatttctcaggctatgatcgcacaatatggcggacaaattttgggaggatctatttccaattctcagtgggcaagcgttttccagcaggtttatccaattggatctcaggttgctttattgaaatacggaagaaatcaggagtctgaggcagatcagatgggattatatctaatgggaatggcaggttacgatccaagagaagcaattcctttctggaacagaatggaagctgcatctacaggagcaagacagccggaattcctttccacacacccgaatcctgaaacaagaatatcagatattaataaaaacttgcctaaagctttagaatattataaggctgcaggaggaagaatgtaatcataaagaattttaatcttgagtaaaagccttgttgaattttaatagatttgatggggctttttaattaaacacttaaacacagcactatgaaaaatttaaccattatcgggcttgttcttttagccttatctattctgctgttttatctaacgtctaataattttaccattaacgatcttcagatgtctcacattatgggaatcttaggaggaattggaattggtctgattatcggcggaatggtaggatatgtaagtaaaggaagtgccataaaagctgagcagaaaagaaaagaatttaagcagttgcagaaagataaggaagatcttgaacagcaggctgcagaaattgcaagacgtgaagcagaacttcgcagtcgtgaaaatcaaaatcctcaaatctaatgatctgaggatttttttatcagttgttattttcgacggttaaaatttatatcctacacctaccataaataagttaggtctgttatcgtatctgatttcctgaccggaaaccttattgataaagtttctggaatctttactgaaagctccttcatatttggcattgacaagaaacttcttaatttcaagctgtgtcccgaattgatagcctactgtaaaattatcctttgcattttcctgaaaatcgttaaaagtatcttctttgcttaaattataacttgcaacaggacctacatacactcctaaaaagtcacctaaaactttatgtccgattaatacaggtaagtccagacggttgtttttaatatcgaaagtggtattggatgcaggatctgtaaaatcacttttaaaagtggtatagtacaactccggcattagaaagaatgacgcaggaagattcgcctttaaagaaagaccaatattgaagcctacattatttttaccttctccttcaattgcttggtttacggttcctttaatgtttttccatgaaggagatcccgtaggaaaaattaaattcgttttcgccgccagagaaatctgtgcggaagccaacatagaaaaacctattaatgcgatactaagtgcctttttcattatcttctatttttgtaatggtattatcaatagttttattattctcaagcagatattctctcagttctttaaataattctgatgaataaacgaaatcaataagatttttattgcccgccgtaatcaggacgtctttatttccttcccattctttaattcccagtctcagatagactattttttccccaatcgtcattaccgaattcatatcgtgggtattgataatcgttgtcgtgttatattctttggtaatttcaagcaaaagatcatcgatgacgttcgatgtataaggatccagtccggaatttggctcatcacagaaaagatatttcggattgttgacaatagctcttgcaattgccacacgtttctgcatccctccggaaatttcagatggaaattttcggttggctttatccagatgcactcttccgataacatcaaaaaccctttttttcttttctctgaatgttaaattggtaaacatatccagtggaaacatgatattttcttccaccgttaaagaatcaaacaaagcacttccctgaaatacagttccgatttctgaacgaagatgctgcttttcttctctggtcatcgtattaatatctcttccgtcgaataaaatttctcccgatgtcggctgatacacattcagtaaacttttcagaaataccgtttttccggaaccactctgtccgataattaaatttacttttcctttatcaaacgtagttgaaatccctttcagtacttctacctggtcaaaactctttttaagatcttttacctcaatcatcagcttaaaattaattgggttaataataattccgaaaggataataaacaccatcgtccagactaccgcctgtgtactcgctctacctacttccagagagcctccttttacattatatccgaaataagacggaaccgttgcaatgatgaaggcgaaaacaatggttttggtaaatgcataataaatgaaaagattaggcatatacatttggatacccaccacataatcattggttgtccagtttcctgttaaaatcccggcaacatatccacctccgataccaaaaacaatactgatggcaataagcaaaggattgaatataacacaagcaataattttaggaaaaatcaggaagttgggagagtttacccccataatatccaaagcgtcgatctgctcggaaaccctcattgttccaatacttgatgcaatataagaacctacttttcctgcaaggataagactgataattgttggggaaaattccagtaccaaaactgcttttgtagcatatcctacgaaagaaggaggaatcggaaacgaagaagcatcgaaattgttgaacatctgtattgcaacaacagctcccacgaatattgaagtaaagatcaccaacccaaaagagttgactcccaaatcgttgatttctctcatgaacagcttccagaaaaccctcattttctgaggcttctgaatagatttaccaagaagaagaatgtattctccgactgctgtaaaaaacttttttaacattctgctaaattagactttttttattgaattaattgaaacttaagaccaagactgaagctccgttttaatattaaatttagtatatcataatgtagaccaaaaaatgttattttgcatttttatctccgcctaacaccaataaaatcgtttttaaaataattacaagatccagaacaaaactccagtttcttacatagaacgcatctgccaaaacccttttgttcatttcaacttccacatctccggcatcgccgcgaagtccgtttacctgtgcaagccccgttattccgggacttaccatgcttcttaaactgtatcttccgattttaggtttgtaataatcgtctacagccaacatatgcggccgcggtcctacaatggacatttcacctttcaacacgttcagaaactgcggcatttcatcaagactggtttttcgtaaaaacttcccgattttggtaattctggaatcattttccgaagtagttttagtagaagattcttcatttacaatcattgttctgaatttaatgcatctgaaaacttcttcgtggaaaccatatctttcctgaatgaaaaaaaccggacctttggaagatgaacggattaatattgcaatgatcggaaaaagccaggagcagattcccaccaaaacaattactgaaaaaataacatcgaaagttcttttcagtaaaaaattagaataataatccaaaggatattttgcctgattgagaatcggctgtgtctgaatatacccaatatcatacaggaaaaaattattctgaacaatactcggaatcagggaaatatgcactttgttggcttctgctaatctgaaaatctctctttcctgtttttcgttgtatatattttcagtgggaataaataaagtatgaattccgtttgtcttccagaaatcaatcaactcttcggctttaatttcagaatttttatagtcgaatattttataaccgtaatctcttctctcctttaaaatattctttaaaacttctgtagagctgttttcgctcaggaacatgacattcctgtggttgattccaagacttctgaagtatttaattccaaaatagattaaagatttcgcaaggaatataaagaagaacaggtaaaacgaaagccagtaaatatccgaattgaaaaatacattataactgacttttccgatgagtaaaactccgataataaacagcaaaaaatgaattaaaagcctttctaagaataaggtataagtaaggtttctcggaatattataaatctttgttctgccgctgagaagcatccagaacagaaataataacgccagagaaaataaattctgataccaggtttcctgattgtattttaagctttcatttctgctcagaaaaaagaatataaaaatagatgcaataaccataaggtcaagcaaaacgatgatcgatttcaggtatctggagtatcgaattctctgcatctatcggcaattacggatacgaaaggctaagttacatattttttatgggatattcaggtacttatgggtctgaactgaagctctccactccggattttctaaaataaagtcagtaatcttaggatacatttcatctcttttgctccattcgctctgaagatacaaagtacagttttccgaaacttttgcggcctgttcctctgcaaatttaaaatcattgttattgaaaacgatcactttaagctcatgcgctttggtataaatttcttctttcggaaggcctgttttctttggcgaaagcgtaatccagtcgatttgtccgctcataggataagcgcccgaagtttcaatatggatggaacagcctaattcttttaactttccggttaaaatatcaagattccacatcaaaggttcaccgcccgtcaaaactatcgttttacagtgtttagctgcggtttcggcaatctcttccgcattcattaacggatgcagattaggatcccagctttcttttacatcacaccaatggcatccgacatcgcaaccgcctaatctgatgaaataggctgcttttccggtgtgcgctccttctccctgaagagtgtaaaaatgctccattacagggagcattttaccttcttttaataatatttcttctgttaaattcattttaaaattagtcgttatagaccgaagttttataagcaatgatggtgtttttcattagcattgctcttgtcataggtcctactcctcccggaaccggtgtaatccagcttgcttttgctgcacagctatcgaaatctacatcacctgccaaatagtatcctttcggagaatcgtcgtctactcttgtaataccaacgtccacaattacagctccgtctttaatcatttcaccttttaagaaatgaggatcgcctaaagcggtaattacgatgtctgctttttttgtatattcttcaatgtcttttgtataagagtgcgtcaaagttactgtagaatttcctgggaaatcttttcttcccattaaaatactcatcggtcttccaacgattttacttcttccgataattacacagtctttaccttttgtttcaatattgtatctttccagtaaggttaaaattccaaacggtgttgccggtaaaaacgtatccatttccaatgccattttcccgaaattttcagggtggaaaccgtcaacatcttttctcggatcaattgcgttgatgattttttcctgatcaatctgctttggtaaaggcaactgaacgataaatccgtctactgctttcgacttatttaattcatcgatcttttccaataattcagattctgaaacggtgcttggaaatttaattaagcttgactgaaatccaacttcttcacaatcttttacttttgcatttacataagccttacttgctccattgtttcccacaagaatggctaccaaatgcggcgctcttctcttgttggcaagaattttttctacttcagccttaatttcctgttttatttctttggatacttttaatccgtcaagaatttgtgccatttttactttattactttttattagatttttttatggatatttttccggattctggtgggtgcagaaaacggagaggatatttacgattttttctttttcatctacatcaaataaaactaaataaggcagtttctttaaaagaattgctcttacatctttatattttactgcgaaaaaaggatttatttgcaaagatttataagcgtccaataattttttcttaaaactcttagctgcagattgagattgcattttataatatttaatggcatcatcaatattattgtttgcaattggagaaaccaaaattttaaatgccatacttttcggaaattctctttaacgattcgaatgcatctaccgattgtgatctgtcttgctttaaagcttcatcaatcacccttttcatttcatccgtcagctcaaaatcatcctcatttttttcaaagctgattttcatctttttcaaaagattttccattaaagtttcttcttctttatttctaagatggatggtaatggtactcatatctttgtatttttaatcaaaattaacgaaaatcagctataatttatttgtttgctttataataattaatcaatccgttggttgaagaatcgtgagaactaactgcttcattgctttcaagttccggtaaaattttattcgctaaaacttttcctaattccacaccgaactggtcaaaactgaaaatattccagatcaccccctgaacgaaaattttatgctcatacaatgcaattaactgtcctaatgaaaaaggagttaattcgttgaataatattgagttagttggtgtatttccatggaagactttataatttaataaaaactcaatttcctcatcagattttcctgaagcttttaattctgcttctacttcttcttccgttttcccgaaggcaagtgcctcagtctgagcaaaaaagttcgccagtaatttatcctgatggtcagaaactttattcgggcttttcgcatatgcaataaaatccgcaggaatcagttctgttccctgatgaatcaactgatagaaagcatgctgtccgtttgttcccggctctccccagataatcggtcctgtttcatattctacaaattccccgtttctgtccacacattttccgttgctttccatatcaccctgctgaaaatatgccggaaaacggtctaaatactgagaatatggaagaatcgcatgagtagttgctgcatagaaatttctgtaccagattccgatcagtcccattaaaacaggaatattttctccaaaatctgccgtctgaaaatgttggtctgtatcgtaagctcctcttaataattgttcaaaattttcataacccactgcaagaacgatacttaagccaatcgcactccacaatgagtatcttccgccaacccaatcccagaactcgaatatgttttcctctgcaattccgaagtctttaactgcctgaacgttagtggataaagcgacaaaatgttttgccacatcttcctgttttcccgcttttaagaaccagtctttggctgaattggcattcgtcattgtttcctgagtggtaaatgtcttggaagcaatgataaataatgtggtttcaggatttaaagttttcacagtttccgccagatgatttccgtctacattggaaacaaaatgaacgtttaaccttgttttgaaatgcttcaaagccgaaacgaccatcacaggtcccaagtctgaacctccgattccgatgttcaccacatctgtaatttcttttccggtaaaacctttgtgatcccctgaaataatgctttcggaaaaagatttcatatgatccagcactcttttgatctgaggcttgatattttcgccgtcaaccagaatttctttatctgaaaaatccctcaaagcagtgtgcaaaactgctcttccttccgtttcgttaattttatctcccgaaaacattttggaaatcgcatctttcaattcgcattcttctgcaagatttaaaagtagattttttgttttggaatcgattaaatttttagaataatcaaacaaaaaattaggtcttttgattgaaaattcattgaaacgattcggattatactgaaaaaggcttcttaaatcgaaatcattattcgcaaattggtcgtcaagtgctttccagctattggtttgagtaggatttatttttgatagcatatctttagaaattaaggttttgtgacttcggattcaggattgttgaattccaaatcctcgtgcaaaattattgatttgcaaatttacggaattttagttcaatcatattaatggatgattaaaaatcaaatgtatgttgagtaacaaatgaatttttaaaatttaaaatgcttatttttaggcataatatttcatgacatcatgctgaacagaagaaattttattaaaaagtcatctttgggagtaggattttttgctttgcctgtttctgcaaggtttttatttgcaaacgattacgtctctaaaagaccgcccttgagcgaaagaaaatttacttcagaagctgttgagaaaaccattaagaccatcaaaaaatcaattgctgatgaagaattggcttggatatttgaaaactgtttcccaaatacgcttgatacaactgtaaaattttaccggaagaataataaaccttatacctatgtgatcacaggagatattgatgcgatgtggcttcgggattcttccgcgcaggtttatccgtatttaagtctcgctaacgaagatgaaaaactgaaaaatcttctgaaaggcgtcattaataagcaggttgaatgcgttcttcttgatccttatgccaatgcatttttcaatgatgccaataaagtaagtgaatggaaaaatgattctacccagatgaaacccggaattcatgaaagaaaatgggagatcgattcactttgctatgtcatgagattatcttacaactattggaaaataacaggagattcttccgtttttgattccgactggaaaaaagcgatgcttttaattttgcagacttttaaagaacagcagcgaaaagattcaaaaggaccatataaatttcagcgatctaacggaaatcctctggacacacaatttgccggaggttatggaaatcctacaaagaaagtggggctgattcattcgatgttcaggccttcggatgatgcgactttttatccgtttttaatttcttccaatatgtttgcggtggtttctttgagggagactgcggaaattttttctgaaatttttaaagatgaaaataccgccgctcagtttaaaaatttagctgaagaagtggatgaagccattcagaaatatgcagttttaaatcatccggaagctgggaaaatttatgccttggaaatcgacggtttcggaaatgctttatttatggatgatgccaatgtgccgaatttattatccattccgtatttaggttacagatccaaagaagacgagatctataaaaatacccgaaaattttctctgagcaaggcgaatccgtggttcagcgaaggcaaatttgccaaaggaattggcggaccgcacatcggagagcataaaatttggcctttgggtttgattatgcaggctttgacaacggatgataacgaagaaattgtttcctgcctgaaaatgctgaaagccactcatgccggaaccggatttatccacgaatcttttgatgtagataatccgaaagactttacaagagcttggtttgcatgggcaaatacattattcggagaattgattcttcatctccatacaacaaaaccggaaatcctgaaaagaaagttttaagcttaaaaacctccggatttgccgaaggtttattgtaaaatttaaaatatatagataaccgaagttaggattgctaaatttctgtggtaggctgttttttagcaggttttctttttcttacaaaataaacagcggcaattccgattaatacaattggccagactgtgatgagtcctactacaattttctggatcagataatatccttccacgaaagctgattttgcgctgtacagaaaatcaaatttgtacttatcgtctatgctttgtgtgttggtaacagcgatttctgcgactcttattttgggttctttgatgtaaatgtcaacagtgctgtatttcaacatgtccgtcatattcatgctttccagttgctggctgtttccttccttcatattttcatcgctcatggttactttgtctttatttaccttcatctgagcaatattgtcggttgttttcttattgcgctgagcttccagagcagaatattttatatttgccgttacatcttccgcatgaatcgatcttgcatttaggaacagttttttattattaattaaagtcagcagttcgcccagtttttctgtgggaactcttacctgcatggtgttttcagactgatatttttttatcagcattgcctgttcatccgatgtattgtaggtttcctcagaaaccacattgcttttcaggtcgctgtgcgttacgaagcctctcaattcctgaacggatttttcaatggaaatggtcgcgtcatagacatcttttacttccatatttacatctgctgttttaatgaactgtttgtcttttaccttcatcgttgcaacagaagaaacactgtccgaagatattgctattgccgaatcagcagatgcatatttttcaagattttcggaagaaacttctccttttttgcatgaataaattcccagtaaaagtgctgttgcgatgcttagtctgatgtacttcgttttcatagatatagatttttaatgttttgcttatcccaaagttcagacagaatcatttgtaatatttgaaaatgaaacgtaaaaattctgtaaagagagattctgttttaagtggttgtaattcattgttttgtaaattgtgggctattcagctacctcattttcggagtaatttttgctgttcttttacaaatcaaacataacaaattattatgtcaaatactttttccaaaatccgaaacgccatagaattattcagatccatagattttgatcagttaagtgctatttctcaaaaggtaaatcttcccaagctgatggaaaatttctccaaattagacgataaacagcttaacggaatgataaaaatgctcgatcctcacaaaaagaaaaaagagcttcctgatatagacggcgatttctacgacatctatcacacattaagtcctgaacagcgggaaattcagttaaaagtgagagcgttcatggaaaaagaagtaaaaccgcttgttaatcactactggctgcgtgatgaatttcctcacgaactgattccaaaatttcaaaaactgaatatctgcggagttacttacgaagggtacggctgtcccggaatgccttttctaatggaaggtgttattgcgatggaaatggctagaattgatgcttctattgctacctttttcggagtgcagtccggtttgtcgatgggttccatttatatctgcggttccgaagagcaaaaacagaaatggcttccacagatgcagaagtttgaaaaaatcggagcctttggattaacagaacccgaagtaggttccggagcagcgggaggattaacggtaacctgcaaaaaaacacctgaaggatggatcctgaacggacaaaaaaaatggatcggaaatgcaacgtttgcggatttaattattatctgggcaagagatttagatgacggcgaagtaaaaggatttattgttgaaaaagacaatccggggtattccgttgagaaaatcaaaggaaaaatggcgttgagaattgttcagaatggtttgattacgctgaaagattgtttagtgacagaagaaaacaggttgcagaatgccaattcctttaaagacaccgcaaaagttttaagaatgacaagagcgggagtcgcatggatggcaaccgggtgcgcaagaggagcgtatgaaagtgcactggattacaccagaaaaagagaacagttcgggaaaccgattgcttcttttcagatgattcagggacatctggtagagatgctttccaatcttacagcaatgcagaccatggttttcaggctttctgaaatgcaggatgaaggaattttaaaagacgaacacgcttctctggcaaaagttttctgtaccatgagaaccagagatattgtttccagagcgcgtgaagtgatgggcggaaacggaattctgctcgaatatgatgtggcaagatttgtagctgatgcagaagctatttattcttacgaaggcacaaaagaaatcaactccctgattgtaggaagatcaattacaggtttcagtgcatttgtatgatattaaaaattaatggtcaatttgtttctcaattttacgattttcatgttatgatttttattaaactcagagaaaattattgctaactgattagaagaaaataaaatttaaataaattctcagttttgagaaatatttattgaattatatgaattgatttaatatatttgttgtgcaagacaaataaaactaaatattatgctgaaaaatcttaaaaaactaaatcgtgcagatttaagagaaattaaaggaggcggtggtgcagaaaaatgcgatatcggacctgttggatgcccttgtaaaattccaccgggagatccttgtttaggcggaggaggagatccgggaaatccgggagatcctgtaggatattgtccggacagcggagagtatatttattgtacagcactttgtccaaacggattacagcctctttgtgcattgtaaaaataaaagccttcaattctgaaggctttctttttatagttaattgttgattatcaatccatttcctttaaagtaatgttcttggaaattttataggttttcttctttttatcaggtttttcttcttcacccagcaatttcccccaaggctgaagtccctgaactctttcgaaaattattttaatgatggcaattgccggaatacaaagaaacatccccgcaattccccacaaatgttctccgataagaattccgataaatgaaaataatgcattgatttttactttggaacccaccacaaatggcagaacaatatttccgtctacaacatgaaccgcaatatagccgattgccacataaatacaggtagatggagtagaggttgcgaaagcgataaaacatgaaatcaaaagactgatgcagattcccagatacggaattacatttaacaagcccgtaagaactcctaaaagaatggcgtattttactcccagaatcgtaagaacaatagaagtaagaacggaaacgattaaaatttgaagacacaatccgataatgtactttttagtcatcactcttacttcgcctactacttcttgaacgctggctttatgtttttcattaaaaacggtaataataaagttgtttaaaacccttctgtaatttaaaatgaagataaaaaacagaataaaaaacacaaaaaatcctaaactcgaggaaaaaatcccaaaagtaaagcccagaataacccccgaagatgaaagaagtttatttagtccctgatcaatataattaagctgttcatctatttttacatgaaaagttctggaaacccaatgctgaatatcttccgcaaccgaggtaaactgctttttaaggtgtggaatatctttactgaaatccgaaagctgtgatccgaaaaagtaaattaatcccgttaaaataaacagcattattaaaacagatgcaatggtagacatcgatcttgtaaatcttaatcttttctccagaaaattggcaaccggcagaaacagcatcgccattaaaaatgccagaaaaaacggagctaaaatactctgtcccaaagcaagaagatatcccaatccaatgatggaaataataaccagcgtgagttttacaagaaaaggaagtcgaagtaaattcatggtgtgaaaatctgttctataaaaataataaaaaccgttagagttaagtgctttaacctttaaatctttttcaactcattagaaaaatgtatgccatttaataaggctgtttacttttagtaaaaaacaataaaaaacacatctcaaatctgagacgtgttttttctttaaatgataagtctgaattatttttccagtgcaatttcgattacctcttccattctgttaacataatgtacattcaggtttttcagataatcttttttgatttcttccacatcttttctgttggcttcacaaagaataacctctttaattcccgctcttgttgctgccagaagtttttctttaattcctcccaccggaagaacttttcctcttaaagtaatctctccggtcatggcaagatgaggttttacttttttatttttaaatgaagaaaccatagaagtcagcatcgcaattcccgcagaaggtccgtcttttggcgttgcaccttccggaacgtgaacgtggatgtttttcttttcgatgtcatcctgagaaattcccagttcatcatgtttcgctttaatatattccagcgcaatggtcgcagattctttcatcaccgttcctaaatttccggtcatggataatgatccttttccgttgctcaaaatactttcaatgaataaaatatctccgccaacgctcgtccacgcaagacccgtcacaactcccggaactcctgtgatttccgacaagcttttcggtctaggaacacctaaaatttcatctactttttcgatggagattttaggatcgtaatctttaaccaaagcagtctgtaacgcaacccaacgcgcaattcctgcaattcttttttccagagatcttacgccgctttccgaagtgtgtgcttcgataatatgttttaattcagcatttccgagtttaaaagatttagcatccaaaccgttttcttcctgctgttttttaattaaatgtcttttggcaatttcaattttttcctccagagtataacctgcaatctgaatgatttccgttctgtctaataaaggagtctgaatggtagataatgaatttgccgttgcaatgaacattactttagacagatcataccccatttccaagaaattatcataaaaagacttattttgttcaggatcaagaacttctaaaagtgccgaacttggatcaccgtgcaatccctgtccgattttatccatttcatccaaaacaatcacaggattggaagttccggatttcttaatcgactgcagaattcttcccgccatcgcaccgatataggtttttctgtgaccacggatttcactttcatcgtgaagaccgcccagagaaagtcttacatattttcttcccagtgcatctgcaacagattttcccagtgaagttttaccgactccgggaggtcctacaagcaaaagaataggggatttcatgttgtttttaagctttaaaacagccatatgttccagaattcttttcttaatatcttccaaaccgaaatgggctttatctaaaattttctccgctttggcaatatcaaaaacatctttggtgtatgtttcccaaggaaggtctgtgaaaaaatccaggtaatttctctgaacattataatccggcgaattaggattctgacgctgcaaacggttgatttccttctggaaatgttcttctacttcatcgctccattttttttctctcgcctttttaataagatcctctacatcaccttctgtaccgcctcccaattcttcctgaatcgttctgatctgctggttcaggaaatattctctctgctgtttatcaagatccttcgaagttttctgatggatctggtttctcagttccagctttctgaaatcttcatgcatcatttcgtagcacttgttggctctttccatcagattcttttcttctaaaagcttttgcttatcagaagaagggaaattggcgtttgtgcagatgaaattcaaaaggtcatcattattattgatgtttttaatggcaaaattcgcagcattcggaatgttcggatccagctcaatgattttcagggcaagatcttttacattttccagtaaagcttcgtattcttctttatttttaggcttagaatcctttagttttgatatttctgctttaaaataaggctgtgtttcaaccactttcttaattttgaatcggtggaaacctttcgtaatcgcagtaatatttccttccggaagtttaatgattttaatgatctttgctaaagttccggtctggtataaatctttttcggaaggctgctcaagatcagaatttttctggcttacgattcctataaaatcgccatttttctgcgcttcttccagtaattgaatggacgcttttcttcccgcagtaattgggatcacaacgttggggaacatcaccatatttcttacaggaaggatagggaatatcttttgctccgaattctgctctgtttccgcaagatcatcaatgttgatttcctgagctacaatatcaaatccgtcgcttatcatatcttctaaactaatatcttcaaattctgtcatagtaaatcgaatgacaaattgtcattatcgttttaattcgttaacgtgaaatttcataatatgttttaaaaaggcagtccatattatgtgtgcttaaaatgcacaagacttatgccatttgttttttactaaaaaatacggtcaaaatttccttttttataaaaattaaattttaaaaattaaaataaaggtcttgtatttccgtaatttcttaaaaatgtgtattttcgcaaactgataaaaaactataatttatataatggcaattttaggacaaattaggagtagaccttggcttttgatgggagtaattgcactggcgcttttggcgttccttgtaaaccccgacagtattgataaggtttttggtaaaaatcctgatgttttaggaaaagtgaatggtgagaaaattacccgtgaagagtttaacgatcaacttttcgtactgcaacaacaggctgaacagcaaggtcaaccaaaaaatggtcttgaagagcaggcttggcaattgcttgtgcaatcgaagctgattaaacagcaattcgagaaaatgggcttcgaaatgacggacgattacttctggaatcagatccagtacgatcagatgtttgcacagcagaagcagttttttgatgaaaaaggtaatttcaagacgcaggagcttaaaaaacaaatcgaagatatgaaagctgcttcgccagaaggttacaaccagtggttgaaaaccagaaaatcaatcgaatacagattgatggcgagacaggtatttgctaatgtttctacaggaatcactacaggtaaaaaagaagcggaagagttgatgagagaaagagatcagttagctgatatcgatttcgtaaaagtagattatgcagcgtatcttcaaaaaaacaacattaaagttaccactgaagatttagcaaattatatcaagcagcatccgataatgttcaaagcggaagaaagcagaaatataggaatcgtttatttcccttctcagccaagtcctgcagatgatgcggcggctcagaaagaaattaataaattattctctgtaggaagcgatgcaagcggaggttctgaaaacttccagaatacaaagaatgactctatgtttatcatggcgaattctgatatgccattcaatccacagtatctgaagccaaaccaattgcctcagactattcaggctcagcttccgactgcagcaatcggtcagacctttggtccttacaaagagcagaatttttatgtagtttctaaacttttagataaaaagacttcagattctacattatcaagacatattttaattgcttttaaaggaagtcctgcaggtgaaggtgttacaagatccaaagaacaggctaaaaagttagcagattctatcggagcaattgtaaaagcaaatccggggaaatttacagaattccttaaattatcaaacgatccaagttctgctgcacaaggcgggagcttaggatggacaactcctgaaacgcctttcgttcctgagttcttaaaatatctgtctgaaaaccctaaaggtgcgacaggtgttgtagaaacacagttcgggtatcatatcatcaacattgaagataaaaaaccgggagcaatggcttacaaagtggcaaacttggtaaaagcggttaaaccttctgatgctacggaagcagaagtaaacaaaaaagcaagcagattcgttcagcaggttcaggggaaatctttcaacgatttcgtgaatattgctaaaaaagcaaactatcagttctctaatcctaaacaggcgaagagattcgacggacagcttcagggattaggaacagacaaagatccggaaatccttgcatgggcttttgataagaaaagagaaaaaggagatactgaattatttacagtagacggaacaggagataaaattgtagtttacttaaacgggaagcaggaaaaaggaactgcagatccggaatctgtaagagatcagattgaagtagtggttaaaaataaactggctgcaaaacagatttcagagaaaatcgggaaagcaggaaatttagatcagatcgctaagcagttcggaactacaaaacaatctgcacaggttaacttattaaatccttcagtagcaggttctatggagccaaaagttgccggagctgcattcggagtgaagaaaggacagctttctaagccggttgaaggaggaacaggagtgtatgttcttgttaaaaagaatgagatcacaaacaaacagcctggagatcttaaacagtttacagaatctgttacccagagaaacggcggaatgttcgggcaggcttggttaaagagcttacaggataattcggatatcgaagattacagaatcgagatctggaataagctaggttctcagcaacaataaaaataatttttcagatagataaaaagcggcaaagtttttgccgctttttttgtgtgtaacgcagagcaatagagaaaaacattcatttaaatgtagtatatttgctcattagaaaaaatttagcaagtgaagttcagtaaagaattaaaagctggtgtgatcgcactattggccattgtcggctttgtggtgctttttcaatttatgaaaggcagaagcctttttactaccgataatatattttacgcacaatatgataacgtcgagggattggcacaatcttcccctgtttccattaatggattaaaggtaggacaggttgataaaatcattcctcatacatctaaggacggtaaaatcgattttcttgtaaaaattacggttgataataattttgagttctcaaaaaattcaacattggaaatttttgaaccgagtttaatgggaggaaaagaaatgagaattaacctgatgtacggaggtccgacggcaaaagacggagatactttaagaggggcatttaaactgggaactttaggaagcctttcttcacaggtaggtcctgtaaaagatcagttgcaggttgttttacacagagtagactctctgatgacgaatgccaatcagcttgtagatgcgcaaaacagacaggaaattaaattattactggctaatcttaacaaaacagttgccgctttacagactacggcaggaagcgtaaattccttagtgggtcacaacgatcctaaacttcagaaagtattggatgatgcaagtcttacgatgcagagcggaaaagttactttagataaatacggaaatctagcagaaagcatcgatactaaaaaactgaatgctaccatcgctaatttagatgcaacagtaggacagttaaataatgtggtttcaggaatcgacagaggagaaggaagtttagggaaaattatgaaagacgatcagctttacaacaatctgaatgctgcttcaaacaatcttaattctttgatcgaagatttgaaagcgcacccaaaaaaatatgttaacttctccgttttcggaaaaaataataaagactaattttttaaaccatgcattatatccctaatattatttttctgattttattaattgcaggttttggactttttgtaaaaagtctgcagaagatatatagaaacatcagattaggacgtgagatcaatcgaagcgacagaagaggagaaagatgggcaacaatggcaactgttgcaatggggcagagtaagatgacaaaacgtcctgtagccggaattttacacctttttgtgtatgtaggcttcatcatcatcaatatcgagcttatcgaaattgtggtggatggaatcttcggaacacacagatttttatcaaccattttaggaaacaccgtttatggtttctttaccgctactttagaagttttggcacttttagtggtaattggcgttgtgatattttttatccgtagaaatttttacggagtaaaaagattaacgatgaaagagctgttaggatggccaaaagaagatgcaaactggattctgattatcgaatttgctttgatgatggctttctttaccatgaacgcttcagactttattctccagtcaaatggttacgatcattttgtaaaagtaggatctttcccgatcagcgaaatgattttcgttccgtttcttcaggttttcagttttgataacggattcttattcggtgttgaaagagcagcttggtggttccattttgtagggatattattctttatgaattatctttattattcaaaacatttacacatcattcttgcttttccgagcacctggtatgcaaaccttgaagaaaaaggaaaattcaataatcttgaatctgtaacgaaagaaattaaactgatgatggatccgaatgcagatccttacgcagctccggcagaaggagaagcagaaacgcctgcgaaattcggagcagaagatattttcgatcttaatcaggttcagttgttaaatgcctattcatgtacagaatgcggtcgttgtactgcggtttgtccggcaaatattaccggcaaaaaattgtctccgagagtcattttaatgaagacaagagaccgtcttgaagaagtcggcaaaaacattgataaaaacggaaaatttgtagacgacggaaaaaaactgttgaacgactacatcaccaaagaagaattatgggcttgtacaacctgtaacgcatgtacagaagcttgtcctgtattgttagatcctctttctatcattttcgaaatgagaagattccttgttatggagcaatctgctgcaccgcaggaattaaacctgatgatgacaaatgtagaaaacaacgctgcaccttggcaatacaatcaggcagaccgtctgaactgggcaaatgactaattaatcaattatgcaatttgaagatttgaaaatggattaatgcattttcaaatttccaaattctcacattttcaaattgacaacaatggatttcaatataaaaacaatggcagaatatgctgccgaaggaaaatcgcctgaagttttattttgggtaggttgtgccggaagtttcgacgaccgcgctaaaaaaattacgaaagcattttgcaaaattttaaataaaataggcgttgaattcgcggtacttgggcaggaagaaagctgtacaggagatcccgcaaaacgtgccggaaatgaattcgtttttcagatgatggctttaactaatatcgaaattctgaacgcttacgaagtaaaaagaatcgttacggcttgtccacactgctttaatacacttaaaaatgaatatccgaatttaggcggaaattatgaagtaatgcaccatacccaattccttaaaaaattaatggaagaaggacgtctgaaaattgaaggcggcgcattcagcggtaaaaagattaccttccatgatccttgctatcttggaagagccaatgaagaatatgaagcacctagacttttactggaaaaactggatgccgaactggtagaaatgaaacgttgcaagaccaatggtctttgctgtggagcaggaggagcacagatgtttaaagaacctgagaaaggaaaaaaagacatcaatatcgaaagaactgaagaagctctgtctttcgagcctaaagtaatcgcaacaggatgtcctttctgtaatacgatgatgacggacggtgtaaaacatttcaataaaaatgatgaagttgccgtgaaagatattgtagaacttttggcggaagctgaagatttgtaaaatagttctaaaaatacaagactcaggatttttcctgagttttttgtttggtgagaattccaccttgtcggattatggtgtgaagaaaaaattgtaattttaccttttaaattgatcaaaatgaagattgaagaatctaatatcgtagaagcaaacgactacagagtaataatatatcccgcatcaagaccttttgaaacaaaagaagcaaaacagataacagagaaactttttgattttctggcaacctgggcagcacacggaaaaccgctttcatcgtcttttaaaattgaaaaaaatcagtttatcgtcatctgtgtggatgaagagaaggagattgcttccggatgcagtattgatgcgcttgggaaagtaatgagagagattgatgaagagtatcaacttggattattcgacaggatgaaagccagctttatagaaaacggagaagtaaaaactttaaagctgaatgattttaaatcaaaagtaagaaacggagaaatttctaaagacattcaggtttttgatttctctaaaaacacttatctggaatttattgggaattttcttttgccattcgatagaagttgggcggcttctataaagtaataattcatgcaggtcctttttatttcatcatggtttccaaataaattagagcctaccaacggaaattttgtacagcggcatgcagaagcggtctctttattgcacgatgtagaaattttacacgcaataggagattctggacagaaggaaagctatattttcgatcaaaatcatattaatggagtaaagacgattgtagtttattataagaagtctaaaaatcctgcattaaattttttaagaagatttcgggcgtataaattgggtttttcacaaatcaagaaacctgatttggtacacgctaatattttggataaatctatgctgtttgcggtttatttaaagaaaaaatatcaaattccttttgttgtaacagagcactggtctttatttcttgaaatcaatagaaacagactctcattttcaacgttatttgttgcccgatttattgcaaaaaaagcttcatttatttttccggtaagtgaaaatttaatgaataacttaaaagagcttaaagtaggcggaaaatttaaagttgttggaaatgttgtagatacaaatcgttttactcctgcaaaacatcactcggatattttcagatttcttcatatatccaatctcattccgttaaaaaatccggatattattataaaaatggcaatccggcttagaagtgaatttcagaattttaaattagagattggaggcgacggagacattgaaagattaaacaaaatcatacaagaaaataaggcggaagatttcataacaacattcggtgaactttcccatgagaaagttgctgtaaaaatgaggaagagcgattgttttgtattgttcagcgaatatgaaaatttaccctgtgtacttcttgagtctatttcttcgggagtacaggtaatatcaactcgtgtaggaggtgtaccggagattgtgaaaaataactgcggaatcatcattggaaagactgaagaagaattatatgctgcaatgaagagtgttttaaatgagacctataaaccggattctccgacggaacttcaccagtacattgtagacaatttttctatgttgaaaatagcggaaaaattcgatgagatttacaggaaagtggtttaaattatttttaatttaaaaagcataaatttccagccacaatattaaaatgaatagcttaaaggattttattaaagcattttttgccaacaaaggacagtatgtatttctgtctctattgatagcgaaaatatgtgcattttcaggatctgtaatgatgatcaggcttttgcctgaaaaagaattcggtatactaagtattgtggcatctgtttttgccatctttgttcctttcagcggttttggcagttttcagagtttaatacgttatggttctttatgcccaactgaaaatgaaaaaaaagacctttctgtttatctttttaaaaaagggtttctgtatcagctttttctcagcatcgtattttttttaattgcgattctttatgtaaatcattactactacatattttatatattttttttctttgctgtacggctcatcggggtttattttcttaatcacaaacaggttgagcttcgcatacatatgaagaacagcgaatatgctaaacttaacaacgtcgtcaatatcggaggattggctatgatggtttttttttcgtttttttgggggctttatggatatctgcttgcgaatttaattgctccttttctttctcttttctggtatagggagccgctgtggaagattgctatccccgaaataaaatttcaaaagaaagaaatctggaatttcgcatttcatgcatcgattacagctttattatcagatgcttttttttctgcagatattttactgctcaacttttttaaagatgaaaatgcagttgctaattataaagtcgttctgcttattccttctaatattacttttttggcactttctttcatgcagagcgattatcctgttttggcaaaaaactcttacagcagatcttttttaattaactatattattaattattataaaatatttatccctgtttctatattaatatttgcattaggcagttttttcagcaccgccttaattcaattatttttcggagcaaaatatgcagacaattcatttgctttttgtcttttattaggagcgttttgcgtgagtatgcttttaagaaacctttacgggaatatgctttctgcggtaggattaatgaaaagaaatactctctattccattttgtctttgctgttcttagcaggattttcttttttttgggttcctgaaaaaggagctttaggaatggcgttttctttagggcttacattaactattatcggttttttcatgatgttttcattcttcatttatcttagaagattgaaatgaattatatttgtaacatgagaaatattgtttttggatttctggttattttttgtgcctttctgagctgcagaacggatgacgatgatttgcagaaaatcgatcagattttgaacatctatatgaagaatggggcaggacgcgatctgtttcatgctaaaaaagatcagacttattttacgtattcactaaatgatgttaacggaaccaaagacgtttctccggtaagcagcactttgcgtgctactgcagactccacactttttattgaatatattgcaggagccaaaagagtagggctggatacgctggatccgaacaacaaaacctatcagtcggtaattacggtttcactggtgaagaggcttaacagcacaattcttgataccattaatgaaaccctcagaattcagtatcgcatgacgccttcggtttttgaggtctcgaaagtttattataacgatactttaaggtttacaaaaacaccgggttccccgaatgttgttacgatcgtaaaataattttatacatttgcaaaactgttgacattttaatgttcaacattctaataactaacatctaaataaaatgttacaagtcaattttttgcgcgacaataaagagcgcgttttagaaggtcttaagaaaagacaattcaagaatcttgagttggtagacgaggctattgctaccgatgaagaaagaaagaaaattcagtttgaattggattcccaactttccgaaatcaataaaatctccaaagaaatcggacttttaatgaaagaaggaaaaaaagaagaagcagaatccgcaaaatctaaaacagcgcaatacaaagagtcgacgtcggaattgaaagctcagttagatgtaaaagaaaaagcattgctggatatactgtaccaattaccgaacattccgaatgaaaaggtaaagaatggtgcttctgcagatgacaatgaaatcatttatcagtctcacgatgtggaaggtcttggagaaggagctattcctcactgggaactggcaaagaaatataaccttattgattttgaattgggcgtaaaaattgccggagcaggttttccggtatatttaggaaaaggtgcaagattacagagagctttggttcagtattttttagataaaaatgttgagaaaggatatatggaagtaaatcctcctcacgttgtaaacgaagcttcaggatacggaaccggacagttgccggataaagaaggacagatgtattacattcaggcagatgatttatatctgattcctaccgcagaagttcctgtaacgaatctctatcgcgatgttttatttgaagaaaaagatctcccggtcaaaaatacagccttctcacaatgctacagaagagaagcgggaagttacggagcgcatgtaagaggtttgaaccgtcttcaccagtttgaaaaagtagagatcgtaagaattgaaaaaccggaaaattcttatgcagtattagaagaaatggtagaacacatcaaagaaattttaagtgatcttgaattgccataccgtgttttaaggctttgtggaggagacacaggttttgcttcagccatgacgtatgatttcgaagtttggagtgcagctcaggaaaaatggcttgaagtaagttccgtttccaattttgaaaccttccaggcaaacagactgaaatgccgttataaagcagatggaaaatctcagttggttcacaccctgaacggttccgcaatggcattgccaagaattatggctgctttgctggaaaataatcagacagaggaaggaattaaacttccgaagaaagtcgctgaatatgcgaagtttgatttaatcagctaaataaaattttgtctatatacaataaaaaccactgtttttcagtggtttttatttggtttatctaaacgatttcatttgaaatgaattcatgattaatctttagtgaatcgtgttgacgttgagtttccgtttttgtcaatcatttgtaaaatataatttcctttggctaaacctgatgcattcagctgtggatttttaactgaattcttttgtgaattgactttttgcccaaccatattgaaaatatttaattccactatgtcgttagctgattttacatataacagatcttttacaggattaggataaacagaggtgtctccatctatttcaacagacttcacccccaacacacttccggaattaattttcacataagaaaagtttccttgcagtacagaggttgagctcgaccagcaagcggtaaaaagtgtaccatatcccgaaacacctgttcctactgcatcaacagaagttgttgttccgttgcttccggtatgacgtatttctattacaaggttagtacctgtatataaataaggagtattgaaatttatatcaaaactgaaacttccattgttcgtaacggcgccggatggtattaaaagacttcccgagcggacttgtgtctgcgttcccacaacgttagctgcaaaattaagctgtctgttagccggttctacgccgtcactaagataaatctgataatccggataggtggtatttgaggcaggccatgcagaggctgcacttgcaggaattctaagtgatatcgaagtaagatactttcctgataaggcagtaagctgagagtcatcaataatcagttgataagttctggtagagttagcaaaaggtcctgtaaaagctgctgttgaagtcaaattaggaacagttactgaagtttgggctttcgttgctgaaaaaaataaaatagcaccaaccgtaaacgcatgacatgcaattttactaaggtagcttagtgtttgatgtttttgaattttctgaaatgagggaaaaggtagctttatatacatatattaaatttttagttacaataaaggtacgaaattgattgtataataaaattgaatttaaaagataatattggtaactgtattaaatttttaatcgaatttttgcgttaataaattgttatttgtgtgatttatataatgttaatgtctggtttgatcattccgaattataattaaaaaaccctccggatatacttcagagggttaaatcttttaaatttagcattactactaatgacaatttactttaccatgatcatgcgtactgtgatctcccggcaaatggcagtctccctgattgtcttttgagatcgtcatcgcttctgcttttggagaaatatagggaattcccagttccattccccggacaataaaaagtccgcccaaaataatcatgacaatcggaatcacttttaaaactttcactctaaaagtctgattcatgagatttccgaccaaaactaccgcgaacataaacggaagtgttcccaaaccgaataaagccatataaaaagcgccctgccatattcctccgcttgctaaacttgcagttaaagccatataaaccattccgcagggtaaaaaaccattcagaagacctgtcgtaaatcttgaacggtaatctgccttttgaagcagtcttcccaaattcgattttactttgaataaaaattttgaaaaaaacggaactttagaagcaaaatcttttcctccaaaagaaaaaacagccattacaataagcagaattcccacagcaattgtaagatatttctggaaacccgccatttcaaaaccttccccaataattccaagaattgctcccaaaagggaataagtgaaaattcttccgaattgataagtgagattctgaaggtagaaattggttgcctgtttttttgttaatcccatcgacaatgcaataggtccgcacattccgatacagtggaatcctgatgcaaaacccaacccgattgccgatattacaagtgctatttccatatcacatcataatccattctgtagtctgttttatcttttgtccagctcaaacgaagggtataattccccagtttcagaacctgtgcaggaattaaaaaagactgattggcatccaactgtaccgttttatgaacatccaggttctgatcgtcggttctgttcagtacaaattttacggaagtattagagttattatagtcttttggaaaagtgattcttattcctgctggattctggctgtaaacaggtttttccttcagttcgtctgctcttttcttagcatcaattacgtcctgatatttcagttcttcttcatagtaattatccgttaccatttcagaattcttttgtccgttcggaaaaagaaacatcatggataatataaagatcataaaggatgctaaagcgataattacaccgtgtccccaattaaagtttttcatttctaaaaattaaaattgtaatttgaatggtccttcaaaatatgttttgtatgaatctaccagtttccccttcatatcataaactccgattgtgatgttctgcttggaaagcgtcatttcattttccggaaaactgatgttgatggttcctttggtaattttgtctctgtctacagaaattttactcgattcgctgtagatcacctctccatggttcggctcgataatcttgatggttacaatttttttctcgttggttttatttaaaaaagtataattgtacgtattggtaatttttccgtctctcacaaagaacgtgcttcctgcaggtttaatgaatttggcttccatttcggctctgctcgtaagaagatagcctaaaaatcctgtaagcagtaaaagaaccactgcaaaacctttcattcttcctgtaaacttaaactcggtctgcttctcgatctcgttttcggtggcgtatcttatcaatcctttcggaagacctaccttttccataacttcatcacaggcatcaatacaggctgtacagtttacacactcaagctgttgtccgtctctgatgtctattccggtaggacaaaccaccacacattgatgacaatcgatacaatcaccttttccggctgcttttctgtcttctccttttctccattttgctctgttttcacctcttttaaaatcgtagaaaacattaatggtatctttatctattaaaaccccctgtaatctaccgtaaggacaaaccaatgtacaaacctgctctctgaaccatgcaaatacaaagtaaaatgcagcggttaaaagaatcataacaataaagttggtaggattggcaaaaggtccttcagaaactattctgaatacttcctcatatcctacgatatacatgaacatgaagtgagtaataattaacgaaatcacaagaaagatcgtccatttaagacttcttttaaggatcttttcactgttccactcctgtctgtcaagtttcatctgcttgtttctgtccccttcaataagataatctattttacgaaaaataaattctaaaaaaattgtctgaggacagatccatccacagaaaattctcccgaaagccatcgtaaaaatgatgatgaatattaaagaagtaattgcgccaagtgtaaggataaaaaaatcctgtggataaaaaggctgtccaaagatgaagaactccctgtcaattacattaaataaaataagaggattaccattaattttgatgaatggcactgcaaaataaatcaacagtaaaacataacttacaatgcttcggtagttggtatattttccttttggttttctgggaaaaacccatttcctcttaccggatcgttccattgtcccgatagaatctctataagtttcagggtccagaacttgtccctgtccgccgcgtacttctgtttcttctatgtctgacatttatgatagtttttaaaaaaagaaaaacataattcgttactattttttaatttaataacaaactatgtttttcatatgttctaatttatttaagttaaattattctttttcccaatgtgcctctgttccctgaggagctgcaccaccttgagccggtgttatcggaggcaattcctgattgatgtgatatacatacgctgcaatcttttcaatttcagcacccgaaacttctccgttcttaccaaatgctctcatcgcaggattgttaggagaaccattccagtccatattgaatacgtttttgaataacgttttctcaggctggttgatccagaaattatccgtaaggtttggaccaattcctccactaccgtcttccttgtgacaagatgcacagtttgttttgaacaattcttttccttcagcaatattatcagcagaatatttagctgtttcaattgttaccggaggctgttcgctgttatacttttcaatcgctgccaactgttctttgtattccttttcatattcgctcaacggatgtgcgaaatctgtaaaagagaatgctgctacatatacaatacaaaaagcagtcccaaaatagaataaacctacccaccattttggcaattggttatccagctccatgattccgtcgaaaccgtggtcgataaggatatctttttcttctgctgcagattgctttttgaatgctgcattatataatcttgtaaagtaaggtactttcttttcagctaaataagctgccttttcttcaggagataattttttgaatttattattctcaattaaatctccgattgcactgtggatataagctaaaatacctccgattactacagttccccagaaataaggagaagataggaaatcatagctttgtacaaacagataataaaaaactattaaaagtccaattattattaaaatgtttataacaaccggtgttctttgtttcataataagtagtttaattttttaaattaaaatcgtcatcactgtcatcctgcagaggtgcttcttcttcctctttgtaatattttttaggcttgctaaaaacgtagattaccaaagcaatgaagaacagcataaagaaaatcaaagccaaagtctggtaaaagccagcgttttcggtattggataagatgtctttaaaattctgagggatcatgattgtgaaccttttaatatgttagttattacttgctgttttgatttcagttgtcttaatatctgttcctaatctttgaagataagagataagtgctacaacttcttttttctctaattctcctttaggtctcttcgcataagcttccttcaaatccggtgcttcagacataatatctcttacaatttttgaagcctgattgtttgcccaagagttggcagaatcaatttcagcttttgtgtaaggtacttcgaaagcactcttcatcagcttcattttatcaaccattttagatctgtctaaatctgttgcaattaaccaagggtaacgaggcatgatagatcccgcagaagttgatctagggttatacatgtgcttgtagtgccaagaacttgggtttttaccaccttctctatgcaaatccggtccggttcttttggatccccaaaggaaaggtctgtcgtatacgaattcccctgctttagagtattgtccgtttttaccgttaaatcttacgatctcatctctgaatggtcttaccatttgcgagtgacaagcattacatccttctctgatataaatatctctaccttctaattccagtggagaatatggttttactgccgagatagtaggtacgctcttcttaagagacagagtaggaataatttccaccatactaccgattgaaatcgttaataaagataaaatacctaataatacaggagttctttctaaccaaaggtgagttccttctccttctttacgttttccgctgatgtttgccaatgcaggtgcttcagcagggacatctttctggaatgacccctttcttacagtagccactaagtttaccaccattacaagagctccggaaagataaagaatacctcccacaaatctcattttatagtaaggaacaatagccgttacagtatcaagccagtttttccaaaccaaagttccgtccgggttgaactgtttccacatcaatccttgtgtaaatcctgagatatacattggaaccgcatagaaaataattcctaatgttcccaaccagaaatgaagatttgccagtttggtagaatatatttttgttctccacaatatcggtacaagataatagattacaccaaaagccataaagccgttccatccaagtgctccaacgtgtacgtgaccaataacccagtctgtaaagtgaccgattttgttaatgttttttgttgccaaaagtggtccctcgaaagttgccataccgtagcacgttactgctacaacaaagaacttaagaataggattttctcttactttatcccaagctcctcttaaggtaagaagaccgttaagcatacctccccaagacggagcaataagcatgatagagaaaccagttcctaccgcctgtgcccaagctggtaatgctgtatactgaaggtggtgaggaccagcccagatataaacgaaaattaatgaccagaagtgaatgatagacagtttataagagaaaaccggtctgtctgcagcttttggtaagaagtaatacatcaaaccaagaacaggagtcgtcaatacgaaagctaccgcattgtgaccataccaccattgtacgatggcatcttttacccctgcataagctgagtaagatttccatcctgtgaaagacaaaggtacttcaaggttattgaagatgtgcagcattgctactgcgatccatgtaccgatgtagaaccagatcgctacataaaggtgtcttactcttcttttcgcaatcgttaagaacatattggctccgaaaatgatccatgagaatgcgatcaaaatatcaatcggccattcgtgttccgcgtattccttagaagtgttgattcccataaagaacgtaacgtacgttacaagaatcataatctgccatgtccagaaatggatccaggacaatgtatcactgtacattcttgttttcagtaatcgctgtaaagagtaataaactcccacataaacgatattcattacgaatgcaaagattacagtggttgtgtgcaacattctgattcttccgaacccgaacgctccatgagtattaatcaatccctgaatacttccacctaaactattaatggttgtatcgtctgttccaaaaaagaattccggaagctcaggatagaaaagcattaatgccgccgtaagtccgaacagaaatcctatgatcccgaaagcaacggtcgcatagaggaatgcccgaacaatactgttgtcataactaaacttttgtgtttccatatcaactattcacttttttcttcaatttttttcttttctcctttttcatcatcgccctctttgttgccagattcttctttttccttgatctcatcggaatcgaagagtattcgtacagccggagattcatcatcttcaaactgtccttttctggcatacactataaacacgaccaggaaaactgcagccaaagaaacgctgcacaggatcattaaatatagaatatccatagacaacaaaattaacgtattttcgggtttcaaatttagtgaaaaataatgactttcatcacgaaatacggcttttggctaatttaaaacgaatctaaataagtctttctaagccccttttttaaagtattttcttcccagaatccaggtcgaaagtgtagtgaatgaaaccaccgtaatagaactcgcaggcataattaaagccgcaaaaagtggatgcatatgtcctgtaacggcgtaacttaaacccacaacattgtaaagaaaactaattataaatgtcattttcacaattgtcatagaacctttgcatacattcagatatttgtctaagcttaccactttctctccattcatgataacatcggaagaaggagtaaaactgttggaatcatctgcaatcgcaattcctacattgctttgttttaaagctccggcatcattcagtccgtctccaagcatggcaactttcatgttctgattctgaaggttttggatataattcagcttgtcttcaggattttggttgaaagccattcctttgtaattcggaattaattcctttaattgattttcctccgaagaattgtcgccactcagaataaaaactttgtaatgggtaagttttttaaacaaatcttttaaattctcgcggtattcattcttaaagatgaatttccctaaaaattcattgtttttactgatgtaaactgcggtttcaaggttttttgattcctgattgttatatctcgcagaaccgattttataaacacttccccttacacttgcttcataaccttttcctgaaatttcctgaaaactttcaaccgggaaatattcatcttttacctcaatgaattcgtataatgattttgaaagcgggtgattggaattttttagtaacgttttgatattcaataagtcgaactcttttatttcagcaccctcaaatttgatatttgatttttttctgtgcgtaatggttccggttttatcaaaaacaatcgtgtctaatttggcaattttctcaattgttaaagtgtcttttacgtaaaatttatttctgcccagaattctcataatgtgcccgaatgtaaacggagcggacaacgccaacgcacacggacaagcgatgataagaatcgcagagatcacctgaaacattttctccagatctaccgtgtaccaataaattgctgaaagcaaagcgattcctaaaatgataaatgtaaaatatttactgatgttgttggttaaagtatcaagtccggtttcatgctttttgaaggcttctttattccaaagctgggtaagataactttggtcaacattcttaataacttcaagttccaatgaagatccgatctgttttcctccggcaaaaattttatctcccggctgtttgctgatgctttcgctttctccggtaatgaaactgttgtcaatattaccttcaccattaattaaaattgcgtccacaggaataatctcctgatttcttaccaaaatccggtcgcccactttaatttcagaaagcagaatattttcctgttttccttcaaaatcaacttttgtaacggcaatcggatagaaagatttgtaatctctgtcgtatgaaagcgcgttgtacgttcttttctgaaagattttacccaaaagcatgaaaaacagaagtccgcataaagtatcaaaatatcccggaccgtaattcgtggcaacttcatataaacttcgcccgaaaagcacaataattcccaaaacaatcggaacatcaatattcacgattttatttttcagaccgtaccaagccgatttgtaataatctgatgcagaatataccacaactggaattgccaaaagacacatcaaagctctgaaaagacctttgtaatgctccatccagtaatcttctccgcctacatactcaggaaaagcaaggaacatcccgtttccaaaggcaaaagccgcaatggcaaattttaccagtaaagatttgtctaaattttcaacgtttttatcggcggtttccagactgatgactggtttgtagcctaaattcgttaaaaaattagctaattcgcttaattttaaatcgttatgattaaaagagatctgtaaggtctttctggtgaagttaacctgagaatatttaatgtgtttgttcagtgtatgaagactttccaaaagccatatacaagaagaacaatggattacaggaattttaaaagtgactaaacttgtgcttccttcagaaaaatccgttaccttttcaaaaatttcaggagtgtcgagatattcaaactgtgaagagctttcatccggacggattcctgcacgtttatttaattcataaaaattacttaagttgttcgtattcagaatttcataaacagatttgcaaccgttgcagcagaaagtcttttcatcaaacaaaattctttccttttcgatcccttgaccacaatgaaaacagttctcgctcaccttcataaattattgaactacaaaattataacaattttttttgtttatcgagttaaaaagttctatttttgtgataaatgtcatataaaatgtcgcaggaacaacaaattgcaatcgaggagaggttcgcaagagtttttaatgataaatcattcaaggaaaggctttccagtgctgattttgaaaaatacattaacgctaaaaagaaactgagttttcagaaacacgaaactattttcgaagatggggaaacgccaaaaggcgtgttcgttctggaaaaaggagcagcgaagttatcaaaatcgggagctttcgggaaagatcagattctgagattcattaaagaaggcgacatcatcggttaccgttctttgctttgcggagaaaattttcaggcgaaagcggaagcaatgacggatattgaagctacttttttaccagcggatatttttatgtatctgttggaagtagattctcagctttcctttgtgatgcttcagaaaatcgcttatgaactgggagaatcttccaataccattactttccttgctcagaaaaccgtaagagaaagactcgctgaaattctactgttattagaacagaaattaggagttgatccggaaggatttattaaaatttctttaacaagagaagaaatcgccaatatcatcggaaccgcaaccgaaagtgcaatccgtctgatctccgaattcaaaggagaccatctcatcgaagtagacggaagaaacatcaaaattctcaaccacgacaaattaatgaaactaggtcacgtagttttataaatcatacaaacttgaagtcggctaaatgccgacttttaacttttaaaaatagatacattatgtctgttcattctgaaattaaaaaagttacaactgaaaccttgcgtaaaatgaaattcgacaaggaaaaaataacgatgcttacggcatacgattataccactgcgaaaatggtggatgcgggaggaattgatgcggttttgatcggagattctgcggcaaacgtaatggcaggttttgaaaccactttgccgattactctggatcagatgatttaccattctcaaagtgtagtcagaggaaccgacagagctttggtagttgccgatttacctttcggaacgtatcagagtaatcccgaaaaagctttggaatctgctgtaagaatgatgaaagaaggcggagctcatgcagtgaaaattgaaggtgggaaagaaatttcaaaatcaattaaaaaaattatcaatgcaggaattcctgtaatgggacatttgggattaacaccgcaatcgatctacaaattcggaacatataaagtaagagccaaagaagaagcagaagctgaaaaattaattgcagatgcacaacttttggaagaattaggatgttttgcagtagttttagaaaaaataccggcagatttagctaaaaaagtaaccgaatctatttctattccaaccatcggaatcggagctggagcgcattgcgacggacaggttttggtgtatcatgatatggtgggaatgaacaaaggcttcagcccaaaatttttaagaagatatctggatttgtatacagaaatcaccggagcagttgcgcaatacgtgaaagatgtgaaaactcaggaatttcctaaccaaaacgaaagctattaatggatcgccaaaaacttcagactattcagggggttatttccattttagccgtaatttgtcttgcggtgggatggtttaagatattttctcctgatattaaccaacttctttccggaagaatattttacatcatcgtaggagtgagcttcattttacaggctcctttactgctgaacaggaaatttgtttatccgatgtatgccgctgcagcactgtgcattatcggcgcatttttaccttatgaatcgaatcttacaggaatgaaaaccatcggtcttttagcaggggtaattatttcttttgccaacagatccaattaccgtcagtagaaaaatggaggaacagattgtttatgaagacaaccatcttctcgtaatcaataaaaaagtcggacagcttgtacagggcgacaaaaccggcgatgattctttactggaattaattaaagattttataaaaaaaagagatgacaaaccgggaaatgtgtttctcggtttggttcatcgtattgacaggccgacttcaggtcttgtgatttatgctaaaacttccaaagcactgtcccgtctcacgcagatggtgaaaaaccgtgaagtaaaaaaaacatattgggcagttgtcgcaaaagagatgattcccaaaacgcagagattggttcattatttaaagaaaaacgaaaaaaataacaaagccattgtttttccaaaagcaaccgaaggagcaaaagaagctattcttacgtacaatgtaattaaaacattagacaattatcttcttcttgaaattgatcttgaaactggaagacatcatcagatcagagcacagttgtcaaaaactggagttcccattaaaggcgatctgaaatatggttcaccgcgttccaatcccgatggtggaattaaccttcacgccagaaaactcgagttcatccatcctgttacaaaggaaaaaatagaaattacggctcctgttccgcaaaacgatgccatttggagagcctgcgaagattaaatttccgtgaaaacacttacccaaaaacagggattttactgtaatgattattgttttttagaaatagttttacactatcaatctaaagaacaataatcatgcttacattgggacaacttaaagaagctacctgctcaaaaactgcatatgcttcgcaattcttaccgtacgttacagcaacatgtgataagttttccatcaacacgccttcacgaatgcttaattttcttgcacaggtcggccacgaaagcggcggattattttacaccgaagaactcgcgagtggaagcgcttatgaagggagagcagatttaggaaatacccagaaaggagatggggtaaaatttaaaggaagagggctcattcagattaccggaagagccaattataaagccgtttcattggctttaggaactgattttgtaacaaatcctacatttttaggaggtaaaaatgttacgaaatgtaatgctgtccaactcaaaaacgcagcagaaagtgcgggttggttctggaacagcagaaaattgaatgctttggcagatcagattgacattaccaaaagcattgataccggaaataatctggttgttttcaaaaaaatcacaaaagccattaacggagggtacaacggcttgcccgacagactgaaccgttataaagcagggttaagttatttcctttaattaaaacaattgctatgaaaaatctattattcttagtcatttttcttttaatcaataacttctctgcccaaaaacctgttcttcatgatctgaaagatcccaaaatgcatgcaggctgttatatcgatgggaagaataatccggttgccaacttatctgaagatgaaggagcattattcaattttaacggaaaagatgaaatttttccttccatcaaaggaacaaaagaatatcctgaagcattcggaaacaaaacctataaaatttacatccgcgaaacgaaatcagtaaaagacggagaatcctgtattgaaaataaaatctattcaataaaaatcatttacagaaaaaaagcctatttctattctaaaaaaggaatgtgtggctgttaattttctttataatatattgtcttaaacaccaaagactatcttgatccggagatggtcttttttatttttaggagctgtttcccgctttcgctactcgcttttttttgatttcggcggcagcgaagctgccgccgaaatcaaaaaaagctcagacatgccgctcaatcgcgactagattgttgtttctgttttcagtatttgaattaaatcaaaaaatatctgtacaatccgcaaaatccgcgaaacataaaagaaaatcttcacgcttcgcgccgcaaatttatttgcctctgcttactaaactaagaatcctgaataagaattttttgcgtttaaataaaacatctgcatcatcctcaaaatcagcgagagatataaaattaaaaatcggttcataaaaatatattttcacgcttcgcgcagcaaatatatttgcctttgcttactaaattaaggagcctgaataagaattttttgcgtttaaatcaaaacatctgtatcatccgcaaaatcagcgagatataaaattaaaaatcagttcataaaagaatattttcaagcttcgcatagcaaatatatttgcctctgcttactaaactaagaatcctcaataagaattctttgcgttaaaatcaaaacctctgcactatccacaaaatcagtcagctaaaattaaaaaatcaatccaaaaaagaatattttccaagcttcgcgccgcaaatttatttgcctttgcttactaaactaagaagtcttaataagaattctttgcgttaaaattaaagcatctttgtcatcaacaaaatcaaaaacttccaacctccctccctcacaaattttgcccatttcaaaaaaatgtctaacttcgtcccatactttaggggtgttcgttgaaaagacgggctgagaatttaccctttgaacctgatttctagatcatactagcgtagggaaaagtgagatgactttgctgtacattctactgtacaataatgggcattcctaaagtgtttttaaaaatttaggaatggagctcacaatcaatcacacgacaaaaaagttcgaaaaacttcccgaaaatctggaagcacttattgctatggaattacctgaaaagaaaaaaggaattgctgtagcactcaacaaccgtattattccgcagtcattctgggcggaaacattcctcaacgacaaagattcagttttaattatcaaagccactcagggtggttaaaaaaatatttttatggctcataacatcacacgttcaccatttccgaactcaaaaaaaatctatgttgaagggaaaattcacccgatccatgtagcgatgcgcgaaatacagctcagtccgacaaaactcagcaacggaaaaatggatgaaaatcctcctgttaccatttatgatacatcaggaccttacaccgacgaaaattttgaaattaatatcgaaaaagggctcccaagaatccgggaacagtggattttaaacaggaatgacgtagaaattctcgacggaattacgtcagagtacggaaaagcccgccttgcagattcaaaattagatcagcttcgcttttcatataatcataaacctaaagtagccaaagaaggaaaagaagtcacccagttgtattacgcaaaacagggcatcatcactcccgaaatggaatatattgccatcagggaaaatcaaagaattgagcagttggattccgtttcaaaagaaatggctttccagcatccgggaaacagttttggtgcaaaaacgccgaaaaataaaataacgcctgaatttgtaagagacgaaattgcagccggaagagccattattcccaacaacatcaatcatcccgaaagcgaaccgatgattatcgggcggaattttttagttaaaattaatgcgaatattggaaacagtgccgtttcatcaagcattgaagaagaagttgaaaaagcagtctgggcttgtcgatggggagcagatacgatcatggacttatcaaccggaaaaaacatccacgaaaccagagagtggatcatcagaaacagtccggttcccatcggaacggttcccatttatcaggcattagaaaaagtaaaaggcattgcagaagatttaacgtgggagatttttaaagataccttgatcgaacaggcagaacagggggtgtcttacttcacgatccatgccggagttttactgagatatattcatttaacagcaaaacgggtgacaggaattgtttccagagggggttcaattatggcgaaatggtgcctttttcatcacaaagaaaactttttgtacacccacttcgaggaaatctgcgaaatcatgaaaaaatatgacgttgccttttctttgggtgatggtcttcgtcccggttcaattgccgatgccaatgacgaagcgcagtttgcagagcttgaaactttaggagaattaacgaaaatcgcatggaaacacaatgttcaggtgatgatcgaaggtcccggtcacgtcccgatgcatatgattaaagaaaatatggagaagcagttggaagtgtgtgatgaagctccgttttacactttgggacctttaacaacagatattgcaccgggttacgaccacatcacttcaggaatcggagcggcaatgattggttggtttggttgtgccatgttgtgttacgttacgccgaaagaacatttgggacttccgaacaaagaagatgtaaaagtgggagtgattacgtataaattggcagctcatgctgcggatttggcaaaaggtcatcccggagcacaatacagagacaatgcgttgagtaaagcgagattcgaattcagatgggaagatcagttcaatctttcgttggatcctgaaaccgcgagatcttatcacgatgaaacgcttccggcagacggagcaaaagtagctcacttctgttcgatgtgcggacccaaattctgctccatgaaaattacccaggaaattcgggaatctgccgaacagggaatgctggataaatcacaggaattcatcgaaaaaggaaaggaaatttatatatgattatcgttatcacttctgaagaactggttcagaatgaaactgaaatcatcaatgcactatttcaggaaggattggatttgcttcatatcagaaaaccttttatccattcagatgaaatgacggattttatccaaaacatacattctgaatttcatcaccaattggttttgcacagttatcacgatttagctgaacgttttaatatttcaagatttcatttcagagaaaccgacagacggaatgatttgtttaaatctttcacagataaaacaatttcaacctctgttcatgatattgagacttttaatgagttaagtgacgattgggaatatgcttttatcagtccggtttttctgagtatttcaaaaaaaggatacggagaaaattcgaatatattgaatgagattcaaaaacgaaatcattcaaacgtaaaactgattgctttgggagggattcatgaaaacaatgttagtggagttttcaacagcagagtagacggagtcgctttgttgggagcaatttgggagagtaataatcctttagatattttcagaaaatgcagaaagagcgtcctttcgtaatgagcattgctggcttcgatccaagcggtggagccggtgtattggcagatattaaaacatttgaacagttaaaagttcagggattggcagtctgtacggcaatgactttacaaacagagtccgaattttatatgcttcaatggcaggcgatagatgaaattttatcagcgaccgatgttttgatgaaaaaatataaagttgaagcggtgaaaatcggagtggtaaaagatgccaaatttttagctcagattgtagaaaaacttaaatccattaattctgaagtaaaaattgtctgggatccggttttaaaaagcacatcggaattttccttttttgatctgaataccatttccgagcttaaaaatgttttacaaaaaatagatttaatcacacccaactataatgaatacaacgttttgaaagaacatcatctttttgaaccatcagaaaatggatgttccgtattaataaaaggcggacatcgggaagatgaaatcgggacagatattttatgggaaaatggaaaagaaatttcaatcgaacccaacaatacaacctctgtattttacccgaaacacggttcaggctgcgtactttcttccgcaattgcaagtcatttagcaaaaggagaaaacttagaaaatgcctgtcgaaaaggaaaattatacatcgaaaaatttttaacaagcaatcagatgtttttaggatttcactcctgaaaattaatattaaaactttgtggtctttgctaagtgaaacgcctttgcgaacttaaaaaacatttagtagttaaaaaaaatcttagcgttcttagtgttaaaatcaaaattgaaaaatggaaaaattacaatacatctctcagggttcaaaattagaagatcaggagttaaacatccgaacagctcttgattatggcgcaaaatggattcaggttcgctggaaaaatacacccgaaaaagatttcataagactctgtgaaatttcaaaaaagttatgttcagattatcaggctgtttgtatcattaacgatcatgttcaggttgcaaaagaagttgatgcagatggagttcatctgggactgaaagatatgtccgtagaaaaggcgagatacattttgggagaaaataaaatcatcggaggaactgccaatacttgcacagacgttcttcagagaatgttcgaacgctgcgattatatcggattaggtccgttgagatttacttccaccaaagaacaattaagtccggtattaggatttgaaggttatggtgaaatcatcaatagtttaaaagaaaaatcaattgagattccaaaaatttttgccatcggcggagtggttttggaggatatccaacagttacaggaaatcggaatttatggtgttgctgtttccgggcagattaccagtcagccttctgtaattagagaattcagaaacattttagaattcagttaaatcttagaacatctaaagtaaaaagtaaatatgaaaaatcaacctttaaaaatagccgacagaatctttgaatcgagattattcttaggaacaggaaaattcggaagcctgtcggaaatgacggattccatcatcgcctcagaaagcgaattggtaaccatggctttgaaaagaatcgatgcaaattcttcggaagacgatattttaagcgcattaaaaccgacaaaatctcaccttttacccaatacttcaggagcaagaactgccaaagaagccgtgttggcggcacagttggcaagagaagcactggaaaccaactgggtgaaactggaaattcatcccgatccgaaatatctgttacccgatcctattgaaacattgtatgcaacagaggaactggcaaaattaggatttgtcgtgatgccttatattcatgcagatcctgttctgtgcaaacgtttggaagatgccggaacagccgtcgtaatgcctttaggagcgccaatcggaaccaataaaggactaaaaacattggattttttagaaatcattatcgcccaaagtaatgttccggttgtggtggatgcgggaatgggtgcaccttccgatgcggcaaaagcaatggaaatgggagccgatgcggttttggtaaatacggcaattgcggtggcgaagaatccggtaaatatggcattggcgtttaaagagggtgtgattgcgggaagaagagcttttgaatccggtttgggcgcaatttcacatcacgcagaagcatcaagtccgctgacggcctttttgtttgattaaattaaatggaatgaagagttttaaagatttttttgaaaaataccaatgggatgaggtaaaaacgaaacttgaaaaagtaacgttaactgatgttgaaaaaagtcttcagaaaaagaataaaaccattgacgattttttgaattttctgtcgccggttgcggctcaaaaactggaagcaatggcaaaaatggctcaacagcttacccaaaagcgtttcggaaaaaccattcagttgtatgcaccgttgtacttgagtaacgaatgtcagaatatctgtacttactgtggtttcagtctggataattccattaaaaggaaaacactttctgatactgaaattctgattgaagcctccgttttaaaatcaatgggcgtgaaccatgttttactggtaagcggtgaagccaataaaacggtcggaattgattattttctgaatgccattcagcttttaaagcctcattttgcgaatatttcgattgaagtacagcctttatctgaagaagaataccgacgggttcacaaagcgggagtacatgctgttttggtttatcaggaaacctatcatcatgaagtgtacaaagaataccatccgaaaggaaaaaagtcgaatttcgaatttcgtctggaaacgcccgacagaattggaaacgccggaattcataaaacaggactcggcgttttactggggctggaagattggcgggtagacagttttttcaatgccttacacatcgattatcttcagaagcaatactggaaaagccgatattcagtttcatttccgcgcctccgaccggcggaaggaattattgaaccgaatttcattatgtccgacagagatttattacagctcatctgcgcctacagaatctggaatgaagatttggagatttctatttccacaagggaaaatgaaaaattcagaaataacattatttcattgggcgcaacagcaatgagtgctgcttccaagaccaatccgggaggttatgcggtggataaagagtcgctggagcagtttgaaactagtgatgaaagaagcgtggaggaaatcaaaaatatcattaaaaaagcaggctacgatcctgtaatgaaagactgggatgtggtttatagcggaatttaatttgaaccattaggtttatttaagaagtttagaaaaattaagctttttgcaggaaaataataagatgagatattcttaaaatatttagatatttccttaactaaacttcattccgtaaatagatcttaatggttaaaaaaacaattgtgcattttgaacctttgtatttcgaaactaagtgaaacgcctttgtttatcttctttccaggcaattaaaatctactctttgtctttcttagcgtttaaattttatcgcaaggataaacaaagttttttaaaataaagcaatctttaatgaaagataaacaaaggcatttcatttataaaagtaaaacaaaaagtagatatatttaacaattaatgggttaaaattactttccaagatgcacaacaggttgttaaaaaataaaaattgtaatgaaaaaagaagacattttctcaagatacagccgacagattttcatagaagaaatcggtctggaaggtcaaagaaaaataatgaattctaaagttttggtaatcggagccggaggtttgggaagccccgttattcaatatttggctgctgcaggtgtcggaactttgggtgtcttggactttgatgaggtggaactccataatttaaaccgacagattattcacaatgaaagtacggttggaatctctaaagtaaaaagcgccgaaatgtttgtcagaaatctaaatcatcaaattaaatttattggaattgaacaaaaaatagatgaatcaaacgcagaagaattgatttccggatttgatatcattattgatggttctgataattttaaaacgagatatttagttaatgatacctgtgtacaattgaaaaagcctttggtttatggaagcattcttggtttttcagggcaggctgcgatttttaactataatggcagcaaaaatttaagagatatttttccggaaccgccttttgatgagtctcttccggattgcgacagtttaggcgttttgggagctctacccggaattgtaggaagcatgatggcgaatttagctttgaaaattattatagatttaccattgccgttgaatcagttaacgttaattgatacgttgaactggcgttttcaaactgttgatttttaatttaaacacaaatagcacgaatacttttcacaaatagcacaaatattctaagttttggctaaagcctttctttcgggatataaaaaagcggactaaagtccgctcctattgataaaataaatacttattagtttcaattttgcttaatcattataaatcaaaattattcgtgaaatttgtgcaaagcattcgtgcaatttgtgtttaaacaaaaaactactgtccctgctgcatcacaccgccattttcatctttcttcgtctgattcagaatattcgcatcttcttttgccaatttgttcttcgtcgggattttataattaaccgataatccgaaatttcttgagtcgtatttcgttctcagcatgaccgtttctcctgaaggtggattggagcgaacctgcatcaattgtccgttgaaaatatcattggcaaaaacagaaaccgtcaaacgattgtccataaatttcttcgtcagcgtaagatccacagaattgttgaatggtttttctgcggtgaaataaaaatatcctgcttttggagtcagataactgtaattggcggttaatttgatctccttcggcaaaatgatctgcgtcatcagattcagaatccagaatcctttattgttcagattgtcaatgtcatgcttctgataacctgcgtaaatgtacatgaagttgatcttatccggattgaaattaaacttcataatttcgctcagcggtttgctgaaaatcatgaaaggaaccggtaatccgacgttgaaattgtggattttcatttcagaaatattaatctgctcgttgaagagattttttccgtcttttctgatgatctgcgctacctgatttttcgctgaacttacactgtatccgataaatgcgtaatcgaaagctgaaatttttatttcataattgtcaaaaatcgttggctgaagattcgggtttcctgttacctgtgtattcggtccctgaaatgtggtgttgtttgggtttaaggcagaaatactcggcaaattgatctttttattgtaattcgctgctacgtatacctgattcatcagattgtactgaacacttgcgttcgggaacaatttaaacttgttaaaaggaagaagatctgcctcaataagatttttattgttgtaatatcttgtaacaccggaaatatcataattttcagcacgcgttcccaaaataaaatcaaactttttcagcttagcctgaaactccagataagttgctgttgtttgtctggtgtattctaaattcgtaattcctttgctttccgtatcaaaattctgatgctcatacaatcctcccaaacttacttttccgccgtctaaaatctttaaaggctgagaataatctactttaaaattggcgatttccatatccgatttgttgttcagtttattagaaaaaggaattctgggactattttcaacaggattggtataaaccacatctgtaaaaatattatcctgaataaatttactgtcggattttgtaaaaccaaactggaaatccagcttctgagatttttctgtaaaacgtttctgataggttaccacagcttcctgtctcaaattatcggtgtgagctgcatcaaaactggaaaaatttccttctctgataatattcggattcagataatacggaagatcagcaagtccgttgctggctgtataattatcattgttgttatggtaaatatcataatttaaaagcaatctgtcctgtccgagatcaaaagtaagcccggattttgcaaaatatcctcttcccactctgtccgtattgcttaacatcagattgtcctgattgctgttcagcatactttcacggtaattctgcccaacattcaattgccatccgaaaattttatttctcgcattcagattcagagagttgcttgttctgcttctaaatttatcataattcgtaaacgaataatttccggaataggttgccgttaaatatttattcgcatttttattcgtaataatattcatgatggcaccgcctgaagtggcaggaaactccgcaccgggctgtgtaataacttcaattcggtctacagaattggcgggcattccttcaagaaaagaatttagctcattggaagtaatgttcaaaggtcttccgtttaaataaacatccagaacttttccctgatacatcattcctgcgatatcggtagaaaccaaaccgggaagttttttgatgccttccagaacgtttccgttattaagctgcggctgttccgaaaaatcgaaaatcgtacggtcggctttctgttcaacggcttttttagttttggtaatggttactccttcaatttgtttttctttggttgcctggttattcgttttttcctgggcaaaagaaaagatgctgcccaaaagtgataacgcaataattgcttttttcataatgtctttctgatattctattagacaatgaaaaaagtacttttgttacatttttattcacttaaatttaaaatctataccctgctgaaataaagaggcggaataatccaccatactgatctctgtctgaagcagataaatttttaacaattccggcttccagaccagcttccacaaagagatttgatagaaatacatatttttctccaactccggctccgattcctaaagatgatccccatttctcattatttaaagtctgaccattatcgtcaagcggagaatatttgtttctgttgtaaatagctaatgcttcaataaaaaaatcttttgcaataccttcattgtctgtgtaaaatctataatatggcataaccgtatatttttctttccattggtatataaaataacttcctattccggcattgtaattaataattcgttcatatccaatatcaattcttgatttaaatattccaaaggcattaatttttacttcgttgttttcctgagcgaaagagagtacaggaagaaacgataaaagcagtaaaagttttttcatagttcagttttactcttagtttttaaagcctaaaaataagctaaatcaatataaaacaaaaagcaacttcaatctgaagttgcttttttatgattaattaaatctaacaattaatttttctcctgttgtttgatcagattcaaagcagaacctgccttaaaccagtcaatttgctgatcgttgtaagtgtggtttgccatcacaatgtctttcgttccatctgaatggatgaattctaaagtcagttgttttcccggagcaaactgatcgagatccaggaaattgatcacatcatcttccagaattttatcgtaatctgcttcattggcaaaagtaattcctaacattccctgttttttaaggttggtttcatgaattcttgcaaacgattttaccaaaacagcttttacgcccaaatgtctcggttccatcgcagcgtgctctcttgaagaaccttccccgtagttttggtctcccacaacgatggatggaattcctgcggctttataatctctctgtacagcaggaacttctccgtattctcctgtaagctgatttttaactttattggtttccatgttgaacgcattaactgctccgatcaacatattatttgaaatattatcaaggtgacctctgtatttcagccatggtccagccatagaaatgtggtcggtagtacattttccaaaagcttttattaaaagtcttgctcctgtaatatttttgccatcccaagccggaaattcttccagtaactgaagtctgtctgaagttgggcttacatttacctgaacggaagatccgtcttcagaaggcgcctgataaccattatcgtccacagcgaatcctttttccggtaattcaaaaccttttggctcgtctagtttaatctgctctccggcttcgttggttaaagtatcggtaatcggattaaaatccagtctgcccgaaattgccacagccgctaccatttccggagaagctacgaaagcgtgggtatttggatttccgtctgctctttttgcaaagtttctgttgaaagagtgaatgatcgaattcttttcacctttttcagcaccttctctgtcccattgtccgatacaaggtccgcaggcgtttgtaaagattctagcattctcaaactttctgaatgaattcaggaaaccgtctctttctgcggtaaatttcacctgctcagaacccggattaattcctaaaatagcttttggttttactccttttgctactgcgtcttccacgatagaagctgctcttgataaatcttcgtaggacgaattggtacaagaaccaattagtgcccattctacttctaaaggccaaccgttggcttctgcttttgctctgaattcagaaacaggcgtagccagatctggagtgaaaggtccgtttaagtgaggagtcagttcagaaagattaatttcaattaactgatcaaaatactgttcaggatttgcatacacttcaggatctcctgttaaatgttctgcaatctgatctgcagcatctacaacatcctgtcttccggtagacgaaaggtatcttctcatggaatcatcatatccgaaagtagaagtcgttgctccgatttccgctcccatgttacagatggttcctttacctgtcgctgaaagagattgtgctccttctccgaaatattctacgatgcagcctgttcctccttttacagtaagaattcctgccacttttaagatcacgtcctttgcggaagtccagccggacattttgccggttagttttaccccgattaatttcggcattttaagttcccaagccattcccgccattacgtcaactgcatctgcgccgccaactccgatggcaaccattcctaaacctcctgcgtttacggtatgagagtctgttccgatcatcattcctcccgggaaagcatagttttccagtacaacctgatggataattccggctcccggtttccagaaaccaattccgtacttatcacaaaccgaactcaggaaattgaaaacttccgagtttttgttaattccctcctgtaaatctgcttctgcacctactcttgcctgaataaggtgatcggcgtgagccgttgagggaacagccacttttgcttttcctgcctgcataaactggagcagcgccatttgtgccgttgcatcctgcatcgctactctgtccggtgcgaaatctacataagaatttcctctttcgtgtgcctgtgttgcgtttccttcccaaaggtgggtgtaaaggattttttctgaaagggtaagaggttttcccactacttttcttgccgcagcaattctttccgggtaacgctcgtacacttttttgatcatatcaatatcaaaagtcatatctgaatttatttttcttctgttttaattatttgctctttgctattaaataaattaacatcattaaattatcaaattctattcctgtatgcttttaaaaatgataaataattctgaaaatttctaaccttcaagttaagaaaaaataaaatttttgggattgatctaagttaaaataatttttgcagatctttaaatggaaagattctaaataaaaaaacgttttgttataaacatcaatctgttgtaaatgcatttaattatattagtatttcataatgactaataccaacatgataaagaataacatacaaagtgaaataaaagagagacttcaaatattagttaaaaacagattcgttaaacctttaaattctataaaaagctttgaagaactttcagaaaatacacatttaggaattcagacgttacgaagattttttggaaaaatagatcaggataaggaaattagtatttcttcacttaatattctttgtagatacgttggattttctgactggcaaactttttcttttgattttgaaagtcaaaaaagaatctcggaaaaagacaaaaattatatagaaaatatgtctacttttttcgagaacggaaataggtataagattgattataatcaaaatacaatgattgtagatactttaaatgatttcgggaaagttatctataagaaaaaagaaaattttcaattttttcagaaattatattgtttaaatgattggtgcagtgactattatttagcttggcttccaaattataattattttgcaaaaaactggttcaaagaaattttgacagttagaattaatcaaacgaaaaatattttagcaaaattggcgctcaataattttttgttttttggctgttttctatcaaataaaaattgtgaagatttagaaattaatgaaattaaaaagttatatgatgaatatcgtacgaattttgagtatatgccttatcatgaaatgcgataccatacaattttattaatcatagctaagcaaaataattacaaagaggaatttcaaagaatattaacaaattatcttaattgccttgaaaactcaggattggaagaaatctacaagcaagaactgatcattttcttttgcaatacacttttatggttacaagaatatgagttggcttactattatttaaaaaaagcaaaactttttataaaattatatcctgcgagaacggttgagcaaaattctatgcactttttcgggattaatctggtttttgtaaaaacaacttttttattagcatggtcagcaaatcaagattctgacacagctgattttgaattgaaaaattctgattttgatgatattacaggtttgctttataatgattacattaaactaatgtatctcgcaaaatgcattattactgaaaatggattaactaagaaaaagcttctctttcaagagcttaaagttttggttgagaaaacaaattactataggatatacattattttggaagatttagattccaatttttttaaatattctgcctagtttttgcctttaaattggacaattttggactttttgttttttactaatcaaagtaaattagctgaaaaattaatacaatgatagaagttatcttatcagaaacctattttaatcaaggttttttcaatattggagttgagtattctgaaagtttgggagatcataatgaacctattgtttttcagaaaaatgatgaaaagttaattttaggttacataaacagaattgcaaattctaattccactccaagaataatgttgggtaaggaatttactaaatggattaaaacaaattattctgttggaaatattttgaaaatagaaattaaatcgaaacattatttaaaagaaaatttgtaatgaaaaagtgttttataataattattgtatttggagtatttttttcttgtgaaaaaaagatgcctaaagacttagaatctacaagaagtgaacttgaaataagagtagagcgaatttatggtatgaatatacaagaactcaataaacttaaaaatgatttagtaaattacactgaggatgctaatcggcgtgggttttctaaagataattctgaattaattaatgaaataaattctcgaattaaaaaattagaggataatagtgttgaaaataaatcttcatctcaactttcagagagtgaggctaaatcaattgaagcttataataatggttataatgatggtcaggatggatatggattgtccgcgtctgaaaccgcaagcgcagatgagtcgtatatggcacatagttataactattctcgtccagatattattgtgtataaaatgggatactatgatggtttagcagggagtcctaaaaagtactaaataaaatcatattgtcaaaaaaatagaagacttcaaaaaaagtcttccatttttactatgaacaaattattttttaatgaccaacagttaccaattctttaatagaaggaacaaaagtagtaaggtcgatcccttcaaccgctgttttatactcatcgatgcttggaattcttcccatgatcgcagaaagtacaactaccggagttgatgccaataaagattctccttttttacgttcagaatcttcaaccactcttccctggaaaagacgtgtagaagtggctaaaaccgtatctccttttgctgctttttcctgatttcccatacaaaggttacatcccggtctttcaagatacatcatgtttttatattcaacacgagcttcgcctttaggagcattatcgtcaaactcaaaacctgaatatttctctaaaaattcccagtcgccttcagcttttaattcatcaatgatgttataggtaggagcagccaccacaagcggagctttaaattctacggtaccattttgtttttcaatgtttttaagcatctgagaaacaatctttaaatctcctttgtgaaccatacaagatccgacgaaaccaagatctacttttttctcaccaccgtaatacgttaaatctctgatggtatcgtgcgtatatcttttagaaacatcttcattgtttacatccggatcggcgatcatcggttctacgatggcatcaagatctacaacaacttcagcgtaatatttagcattggagtcaggagtcagagcaggtttttcaccagatctgatttcctcaattcttttattagccttgttaattaatccctgaagaacctgattgtggttatccattcctttatcaatcataatctggattctgctttttgcaatttccagagactcgattaaagtagcatcttcagaaatattgatggaggcttttgctttcatttcagccgtccagtctgtgaaggtaaacgcctgatcggcaggaagtgttccgatgtgaacctcaataattcttccctggaatacgttctctcctccgaactgtttcagcatctgagcctgagttgcatgaaccacatcacgaaaatccatgtgttctttcatggttcctttgaatgttacttttacagattccggaattggcattgatgcttctcctgtcgccaaagcaagagcaacagttcctgaatctgctccgaaagcaactcctttagacattctcgtgtgagaatctccaccgatgatgattgcccattcgtctacggtaatatcgttaagaactttgtggataacgtctgtcatcgcgtgatattctcctttcggatcacgtgctgtgattaaaccgaattcgttcatgaatttcattaatttaggaatattagcctgtgcttttttatcccaaactgaagcggtgtgacatccggactggtaagctccgtctactaccggagaaattaccgttgcagccatagattccaattcctgagccgtcattaaacctgtagtatcctgagaacctacgatgtttactttcacacgtacatcggatcctgcgtgtaagattttacccggagtttttcctactgcatttctgttgaagattttttcaaccgcagtaagaccctgtccttcgtgagaaatttctttagaaggtgcaaaaactaccggagcttcgatgcctaaaacttcagcagcaaatgtctgtaattttttaccgaacacgatggcgtaagatcctcccgctttaatgaattccattttctgcggagtgaaagattttgtaagatcaataagttcctgatctccgttgtataattttttctctttggtattgatggttaaaaccgttcccgttgcaacagaataagtctgctcaagaataggttcgccttcttcgttaagaacagcttttccgttttcgtctactttctttacccagtttttaagatcgattccgatacctccggttacgtctactgttgtaaggaagataggagagatgccgtttgttcctccaacgataggagcaatatttacgaaaggaatataaggacttgcctgttttcctgtccaaagtgcaacgttgtttacacctgacatacgcgaagaaccaacccccattgttcctttttctgcgataagcattacgcttgcatccggatgttttgcctgtaaagctttgatttcttcctgcgcctgaggcgtaatcatgcatttaccgtgtaattcgcggtctgatcttgagtgcgcctgattacccggagaaagtaagtcggtagaaatgtctccttcccctgcgatgaaagtaaccactttaatttcttcagcaacttcaggaagttttgtaaagaattctgcctttgcatagctttcaagaatttcttttgcaatttcgtttccgatattgaaggcttctttcagacgggttgtatctgcttcataaaggaaaacctgtgttttcagtacttctgcagcctgtcttgcaatattttcatcgttgcctaaagcaagatccaacaatacttcgatagattttccacctttcatgtgggataacaattcgaaagcaaaaaccggagagatttcttctactacagattcaccaagaataatttcttttaaaaatttagcttttacaccggctgcactcgtggttccgggtaaggtattgtaaataaaaaatttaagagaatcagccctgtactcgtttgctgtatctttaatctgtgcgatgatctcgcttaataattctgcactgtcaatcggctttggatgaagcccctgagtttttctttcttcaatctcttggatgtaatcctgataaatattcataataatagaaatcttttcaatcttaatcggatgataatcaacattattcacgagaagattatcatcgtgtgttttccggcggaattattatttttattttttctgatctaaacaagaagctgaaatttttagatagtgtattaaaaatgacttctttaagacatctgtcataataaatgcctgaaaacgtgcccaaatttacggaattttacaattttttcaagtttaaattatttagattctttataaatatctattttatattttctatttttggcgatatttttgcaaacaattgatgattatgaaaaatgcagcttcggttttattcctttttatttcggtttttgttttttcacaaacgaaaaatgtgaagaaattgccttcaaagacagtctctaaaactgcggttaaaaaattaccagaaaagacaaagcagaatagtgattttccgatcatcaacgaagagcttccgcttttaatcccgaaaaaacaggatggtaaattcggatatgtgaaccaaaaaggaaaattcatcatccagccggaatatcacattgcggtatttttctacgaagactgtaatcttctgaactctcctaatgtaaaactcagaaaattcgggactgcggattatgcaacggtagaaaaagatgaaatttcttaccgtgtcgacagaacaggcaaaagggtgtatcagtataaacagtccgatttggcaaaatgtcctcacaaagaatatgttcagcagctttttcaggtgtatacgatgaatggttttttcggaatcatcgaaaaagcgacgtttgaaaatccttatgactacaaacagtttaaaatttatcctcaatacgactatctttttattttagaaggtgatgatgttgccaatcccatgattattgcttcaaaaaataatgttttcggagtggtggatgtgaacggaaaggtgattattccgtttgaatattctgatattaaacgaaattttagctggaagcttggtaaaatgttcgaggtttcaaaagacagtaagaattattactatgtagattcgcagaataagacctattaaatttaaataagaatttcaaaaatctttcacaaataccacaagtttttcattaaatgatcttggtgaaaaaataggttggaaaaacgtaatttcccacagttggtaaatttttcgtaatttcgcggctgaaataaaggggtgctgtagcaagctgagattatacccaatgaacctggaacgggtaatgccgtttagggaaattaaaaatgagcaataggtaatgagcaatgagtaatcctcatcatattacttattaccgattaccaattcctcatcataatccgccccttttattcattaaattttaaagatttatagaatgaaaggattattttttttagggcttaccgttggctctttcgcttttttacaagcacagaattccgattccctgaaagtaagggaaattgaagctgttaattttgccaaaagacttcctgttgccaaagaaatcatcaatgtccagaaagatttggacagcagaaatttaggacaggatctcccgattttactgaagaatcagacttctatcatttcaacttcagatgccggaaacggagtggggtatacaggattccggattcgtggtgttgcgggaagcgctattaatgtcatgatgaatggcgttccgtacaacgattccgaaagtcaggggacatttttcgtgaatgttccggatcttacgagttcggcatcacagattttaattcagagaggggtgggaacttccaataatggttctgcggcttttggagcaagtattaatgtgctttccaaagatcctgatgagaagttttattttaaaacagacgacagttacggatcgtttaatacctataaatactctgcagagataggttccgggaaattctggggaaaccgtctttctgtaatgggaagatatacccacatcaattctgacggatatatagaccgcgctttctcaaaattaaattcttacaatctgacggctttgtatgaggaaggaaatacaagaattcgtctgatggctttcggaggaaaagaaaaaacctatcaggcgtggaacggaatcgaccgaaaaacatgggaaactgatcctaaatttaattattcgggagcgatttatgattcgaattgggaaaacatcgtgggattttacgataatgaaacggataattaccgacaaaaccattatcagttgctttgggaacagaaatttaatgctcaatggaatttagaaacaacggtacattatactaaaggaaaagggtattatgaaaactataagcaggacgctaaattttcgaaatataatcttcctaacttcattaacggctctcaaaccttgacgagaaccgatttcatcagaaaaaaatggctggataacgatttttacggagttgtttccacgctttacggaaaattaggagctgttgatgtgaacttcggagccgttgccaatcaatattacggaagacatttcggaaatgtaaccggtgtttttcttcctcagattgatgaacatgaatattacagaaaccgctctgtgaaaaacgaagtttcaggttttgccaaagcattggtaagaatgaatgattttgaatttttcggagacttgcaattgagaaatgtagattatgatacaaaaatcatcacggcaggagatggagaaggggctgatttaaataaaaactggctgttctttaatcccaaagcgggaatcaattataaaatttcagcaggaaaaattttcgtttcctatgctcatgcgcaccgcgaaccgaacagagatgatctgttggcaaataatgaagtaaaggctgaaaagctgcacgattttgaagccggagtagaaaagcagttcggaaaagtatcttttactgcgaacttgtattatatgtactatgtaaatcagttggttttaaatggcgaactgaataatgtgggagctttcatcagaacgaattccggaaaaagttaccgaagcggaattgagcttggagctttggcaaaactttccaaacagtgggagctttccggaaatgtgagtttcagcaacaacagaaatttagattttaaagtggaaacagaagctggtgttaaagatctcggaaatacgcagatttctttttctccggatgtgattgccaatttaggtttgaaattcaatccaacgcagaatttccagtttgcattgatgaatcagtatgtcggcaaacaatatctggataattcggaagatgaaaatttacagctcaaagattattttttaaccgattttaatgcgcagtatcagtttaaaattaaaaataatgagattgctctaaagcttttggttaataatttattcaataaaaagtatgtgaacaacggagcagtttatgacggttctccgtattatttttctcaggcaggaacgaattttatgtttgggatcagctggaaaattcagtaaacagtcaggctatatttaagattaattatagaatgtaaagttagattaaaggctgcttcggcagtcttttttgttgtttttcagttttaaaatcaataggagcggactttagcgtattttcaaaattaaattctgtaaaattggtttcatcccaaaatataattcatagttctaataattttaaacataaattcatcatcaataaatctctcaaaaagtcgcggaaaagtcataaatttgctgccaaatgaatatttcagcttacattttagaatatttgaaacaattcgggaccgttgttgttccggattttggcgttttttctttggaaaattccaaagccattatcaattccgaaaatgggagcattcttcctcctgcaagcaaaatcgtctacactcccgattatgaagtaaagtctgatgatttggcatcttttattgcggggcagaaacagatgactttggaagcttcaaaaacagatcttcagattcagaccgatttttggaagaaaaaactgcaggcagatcagacgcttgaaattcagggtttaggagtcctttttgtagaagacggcaaaacgcatttcaaaggaaacagactgcagtcggatcatccggatttttatggtcttgaagaaattaagatttccgatatcagcaataaaaacactcagtcagaaacttctttgaatactgaaaaagattatcagtttaataaatctattctttgggcttttctgattatcatcccgattttaggaatcgtatacgtagcttacacgcagcaggaacttcttttcggagagaaatcttttgacaaagccaatatctctgtacagacaaaaacacacagaattcaggacactgtaaaagctcagccaaaaataatgaatactgctccagttgcggattctttaaagaaagattctgtagcaccaaaaaccattcagcccgcagtgcaaaatgcggcaaaagttcaggcaactcaaaacaacactaagacaacgaaatggcaaaaataaaaaaggcgtcagaatctctgacggtgatgacgaatattgtacttccgaatgacaccaaccaattgagaaaccttttcggaggagaattattggcaagaatggatcgatgtgcttcgatttccgcaacaagacattgcgaaagaagagtcgtaacggcatccgtaaatcacgtttcattcgaccatccgattccggaaggaggaattgttgtgatggaatccaaagtttccagagctttttccacctcaatggaaatttatgtagatgtttggctggatgatccgatcaatcataaaaaaattcagaccaacaaaggaatttataccttcgttgcggtagatgagttcaacagaccgatcccgattccagatatggaacctgaaacagatcttgaaaaagaaagatatgcagcggcacttagaagaaaagaactttctttgattctgtccggaagaatgaaaccctctgaatctgttgagcttaaaaagcttttccaggaagatactacggcataatttctttcaaagacaatccgcagaatactagagttatcaatacagatagaaccgacagaaatatttgtcggttttttattgctgcttccaatgatgattctaaatattcatccgtttttctgaacattttttcagggaagagtaagattaaaccaataaaaattaaaatgatggcattaattgctgcttcaaaccatagaaaaatcttatccccaaaaccatctgcaccttcagaagaatagtgaattggaatcgtttcatgaattgaagaaaattttaccgctaaaaaaattaggtaacccaaaaacagcaaaatggagaaactgaaaatgactttatataatttcattttgatggaaaaattgaaaaattctatttcacaaaagcggtttctaaaactttgaatcttacctttgcatcagcaaatataaagaattatgtcttccatgagaattttactcctcgataaaaaccatcccttaattaccgaacagcttttagctaaaaactttattctggaagaggatttcagctcttcttatgatgaggtttgctctaaaattgaacaatatgacggaattatcatccgaagcagaattcctttggacaagaattttttagaaaaagctaaaaatctgaaattcattgcaagagtaggagcgggaatggaaaatatagatattccggtggctgaaaaactgggaattcaactgatcaattctccggaaggaaacagggattctgtggcggaacacgttgtcgggatgttgctgattttaatgaaccggcttttcatcgcttctcaggaagtgaaaaacggcatctggcttcgggaagaaaacagaggcgacgaactgttgggaaaaacagtcggactcatcggttacggaaatatgggaaaagccacggcaaaaagactttcagggtttggctgtaccgtgatttttcatgatattcttcctaatctttcggatgaatttgcaacacaggtttctttggaagaattaaaggaaagagccgaagttgtaagcttacacattccattaacagaacagacgtattatctggtggacggtccgtttatctctgagatgaaaaacaatttctattttgtaaacacagcaagaggaaagaatgttgaaacgaaaagtttagttgaggcgttaaaagcaggtaaagtaaaaggtgcctgtcttgacgttttggagtacgaaaaatcctctttcgaaaatctggaaacaaaaaatgaagaccttcaataccttctggaatccgagaaagtaattgttactccgcatattgcaggatggacggttcagagtaaagaaaaactggcgcaggtgattgtagataaaattgtggcacagtttgcttagtcttaaaattcagtaagattagaaacaaattttcacaatactgttttatgaattatttttcatttttatttatgttaaataattcataatttctattcaggagatacgaattatttcgagttttattaaattgccgctcattttcgaaactcatgacgaagcgtaattttatccttgtattatctgcctttttatttcttttttcctgcaaaaaaaaatctgaaaatcaggacagtgtcactgaaagcacgaccaatcttcccaatttcggaaatgtagacttagccaacgtttttacacctgccgaaaatcaggttgccaataaggcttcactggcaaattatatcaacagctattatcagaaagtttgggaaaacggcgatctgagtgggggaattttagtcgcgaaaggagataatattatttacgaaaattacagaggctttgccagagaaggaaatcagaacccgattgataaaaatacgccgcttcatgtcgcttccgtttcaaaaacattaaccgcaatggcaatgctgaagttggtggaagcaggaaaagtgaatttatccgatcatcttacccagtattttccgggtttcccttatccgaatgttaccgttaaaacgttactcgaccagagaagcggtcttccgaaatacgaatatttcatcacgaaaattcagccggctcccgcagaactttcaaaaacgttccttaccaatgaggatattttgaatatgatcattaaatataaaccggatctggcaagagaaacagacaccggatttatgtactgtaacacgaattttgccatgttggctttgattattgaaaaagtaacgaaagttccttttcctcaggcaatgaaagaaatggtttttgatcctctgaaaatgaaaaactcctatatttttcaggaaaaagatattccgacggcgtcacagtctttttattacggaggaaataaactgtatcctttggacaggctggatttaatttacggagacaaaaatgtatataccacaccgagagatttatacagtttttcaaaagcaatgttttcgaaagattttttaaagcctgaattgatggagcaggttttcacgccttacagcaatgaaaaattcggaatgaataattacggtttcggtttcagaatgaaaatttttgataacggggaaaaacttacgtatcacaacggttggtggcacggaacgaattccgtttttgcccatcttctgaaatctaaagtcaccattattgccattggaaataaatactccaacagagtgtatacagctttggctttgtctggattattcgaagattttccgcctcagaaagataagcttcacagcgtaatgagcgatgatcgcgatacattaaaaggtcatagtgaagtttatggagaataatgtttatttttgcgtaaacatcttcatgaaaagaattctttttttattggttttcgcttttcttttgcagtcttgtgcaagggtaggttcgcctgtaggaggcgcaaaagattccttggctccgaaatttttaagctcaaatatagattcttcaagagtaaatgtgccaagagatataaagcagttgcgaatagattttgacgaatacattacgttaaaagacatcaacaaaaacctgaatatttctccgccgattaaaaatatcaccagaattgttccttccaatattgccaacaagtttatcctgatccagtggaaagatactttacaggcaaatacaacgtacaattttaatttcggaaattctattgcagataataatgaagccaatattctgagatattacaattttgctttttcgacgggagataagcttgatgatctttatgtaagcggggatgtaagagatgctttatccattaaaaaagccagtgagaataaatttgtggtaggattgtatcaggtaaaagacaccatcaattacagacaaaaaccttactacattaccaaagttgatgatgatggctattttgaactgaattatcttgctgccggaaaatataaaatcatcgcatttgaagatgaaaacggaaattccatctacgatccgggaaaagaaaaagtaggtttccagaaagatcctgttgtcgtagaaaaatcggtttcaggattaaatctgaaattatatccttctaaaaaaccggtgaaatatcttgaaatgaaagaagctccgggaggtgttgtgatgactttcgaaggaaaaccgaatgaagtaaccgtaaaacctttaaacgaaaaaataaaggagtacaaggtaacccacgctccgaagtccgattccttaagaatctggtttgatgctgtgaaaagtgatgtagggcagactacaaacgagaatttgaaattcgggtacaatgcaggtatcggaaaaaaagacagcctttacaacgcctcgttgttttacagatacaatgcgaaaaacgcaatggacatcaacagcgataacggcggtgcaatgcttcctccgaaagaagactttaaaatcctttccaattattatgtggataaaataaacactgataaatggattttcagagttgcaggagactcattgaacactgttccttttaccgcaaaaatctcagagaaaaatccgtatcagattttggtgaaagcggattttatttcaggtaaaaaatatcagcttaccattccgaaagaaaccgtttcatcattctttgcaaaaaattatcagtcgaaacgtttcgattttgaagtggataaagttgagaatttcggaagcttaaaattcatccttcagaacgctcctgcatcaaattactggctgcaacttttagacagttcagataaagtattgttccagaaatataccaaaggaagtgaggtgaaatttgatattcttaaaccgggagaatacattgtaaggattttagtggataataacgaaaacggcttttgggatgaagcagatttccagaacgaaactttcgcggaagattcctacatttactacaaaacagccatcgtaagaccgctttgggacagcaacgaaaactgggatcttaaagatacaagagttctggatccttcaaaaatcagcacaccgaaagcagaaccgaaatctcagccgaaagatgctaataagcttgatctgaaaggaaatgatgctttggtaacgccttcaagataaatatgaaaacatttaagaaaatatttttctggactttgctgggatttgctttaattcagtttatttcaacagataaagtaaatcctccggttgatcacaaagtgaattttgtggatgctaaaaaaacacctgcaaaaattcagggattgttgaaaggagcgtgttacgattgtcattccaacgaaaccgtctatcctaaatatgcctacatcgcgccgatttcatggtctgtgaaaagccatatcaacgaaggacgggaacatcttaatttttcgatttgggatacgtataataaagatttaaagcagagtatgctgagtaaatcgatccagactattcagaataaaacgatgccgatgccgggttatattgtttatcataaggaagctaatctgtccgatgcagaaagagctttactgattcagtattttgatcagatgctgaaatccaaaacttattaatcatcttaagtttggtataagaatttaaaaaagatgaatagcttaactatttgattttcagagttcttatctattcatgcgatcaatcgtttttgtattgcttggataagtgaagcggcattgtttatcttaaaagcatttcagagaatacttcttcgtttttctttgcgataaaataatcagattttgaaaatcaacttaagaatctttaatttaacctgagttcggcataagtcctcttaaccgcaatgttaaacaatgagattcaattattaagaattccgcttttaagatatacaaaggcgtaaacttatcgaagtaataccatttttgtgtttttaaataaacgaagtgcctttgtttagcttacaaacttttaataagtaaaaaaatcttttgtttttctttgcgataaatcaatcgtttagatttatttcttattcctaactgaggttagtttaggttgatcatgcaaagcaagagcataaaaaatctcccgcaaatttcacatattcagtagatgtctgtaaaatctgcgagagaatatatttcaggaatattaaatattcttcagatactcttcaaaaaactttttctgagaatcaaaagcgatatcctcgagattcagttcttttaaaggaatccagactgcttctgaaatttcagacagttcaagattcacttcaaatttttccggaacgcggtattcataaaaaagatcaatggtattataatcaatctctttgtactgatagacgtttggaaggctcgttaagtactttaaatttgaaatatcaacatccagctgcagctcttcaaaaagttctcttttacaggtttcttctgcactttccttcggatctacaaaacctcctgcaagatcgagttttccctttttaggatctctgtttcttcttgtaagataaatttcatcattatatcttattaccacagctaccgctccggcaacgttgttgtataatgtgaaaccacagttttggcagctccattttctttctccatcccactgtaaagattctttgccgcagttggggcaatatttcaatattttcattgagttacattaatatttctcgggtgataagacaagatcacatcacgcagctcttctgttttcaggtgggtgtagatctctgtcgtcgtaatgctggaatgaccgagcatttcctgaatataacgaagatctgcaccattctgaagcaaatgggttgcaaaagaatgtctgaatgtatgcggtgatatttttttgcttacacccgccttgtctgttaattcttttataattaaaaatacaattactctggacatcgacgttccgcggctgttcagaaataaagtatcttcatatttcttattgattttacttttggaacgtacttcctgaatataattttccaaaagatctgccgtataatccgctaaaggaacgaaacgtatcttgtttccctttccgtttaccttaatatactgctctttaaaattgatattggaaattttcagatcaataagttccgaaacacgaagtccgcatccgtacaaaacttcaataatacactggtttctctttccaaggtcggaatttacctcaatcgcactgataatcttattgatatcgggcaggcttaaggtatccggtaagtaaagtcccagtttaggaccttcaagcaaagaagccggattgtcttcacggtattcatcctccagtaaaaatttgaagaatgccttaatggaagagatccatctcgcctgagatctttcgctgaatttttgtttggaaagattgaaaatgtattcctgcagattttcgtagcctatagtatccggtccgacgttgcccagatcttcttctgcgtattcttttagttttttgatgtctcgaatataggcatcgagagtgttttctgaaaagtttctctcgaatcgaagaaagatctcaaaatccttaattttttcatcccaagtcatgttgtgttatttttttagttcactttccgaaatttgttctatttcaatatcgtggtttcttaaaaatgatatcccgtcgtcatccgaatattcattgatgtagacaagtctggtgattcccgcctgaagaatgagcttactgcattctttacagggtgagagcgttaaatacaatgttgcgccttttgcagactgcgtggaagctgccagttttaaaatagcattggcctctgcatgaagtacgtaccagtgtgttttgccgtcattgtcctcacagcagttttcaaatcctgaaggagtaccattataaccatctgaaataatcatcctatcttttacgataagagctcctacttgttttcgtttacagtaggaaagttttgcccattcctgagccatttttagataagctttgtcaaacttattcataccgccgcatttgtttgtttcgaaataatttgtattaagggtaaaaaaggctagaagcttggctttcttttttcaagaaaagcagaaactccttcttttttgtcgttcatttcaaaaagctctccgaaatatttaatctcagtttcaaaacctttatccgtgtccgataagtttacagcttgaattgctttggaaattgccattggtgaattgtgggcaataacgttggctaattcttttgttttatttaataattcttctattggatatacttcatttaccagtccgatttcttttgcttttgcagcaggaatcatcttggcagagaagatcatttcattggcaatgccttttcctacaagcttcggtaatctctgggttcctccgtaaccgggaattaatcctaaagttacttccggaagtcccagttttgcattttccgatgcgtatctgatgtggcaagccatggcaagctcaagacctccgcctaatgcaaaaccgtttacggctgcaattactggcttggtcatattttcaattttgttgaataaagtattgtgtccgtttttggcaagttcttctgccttttcctgtccaaaatcactaaattctttaatatctgctcctgcaacgaaagatttttcaccgcttcctgtaagaataataaccctgcaggattggtctgaatctaattcgtccaaagctgaacttaattcgctgattgttttagcattaagtgcatttaaactttcaggtctgtttattgtaataatagatattttatcttccttatttaataatatattttcgtaacccattttccactttaaaatattattctgtgcaaattatgaattttttataaaaaaaaggaaaaaatgttgattttttttccttctgattgaaattattgtttaagatgcttattttgtgtggttcatcatatttgcatcaataaccacattcagttgagatgccactttcattccaagctcgatattagctctgaaaaaatgacataactgtctgttaatgatctcatcttttttcggtcccgtgattcctttcatgcttccaacaatgttatttacaaggttttgtctgtcttccgtattcattgcctttgtatataataatccgggttgggtgtaatgatcgtcatcattttcatttctgttgtagctcgctacgtgcgcgctgtccagttcatattcgaaacttttgtaggcaggatccggcttaatatcatcaaagctgttcgggtgatagttcggcttgtcctgataatggcttgaatctgccatgaatccgtctctctgataattgttaacggcaaaaggacatcggttaacttccagaagatgtgcatttacgcccactctgtatcggtgtgcatccggataagagaataatcttccctgaagcattttatccggcgaaaagctgatcccgtcgattaaattgcttggtgagaatatagattgttcaacatgagcaaaataattgacaggaacttcattcagttccatttctccgacttcaattaacgggaagtcgctctggaaccatactttggtaatatcaaaaggattccatctgaaatctcttgcctgatcttccgtcattacctgaatatacatcgtccatttcgggaaatttccttcctcaattgcgttgcaaagatcttcctgcgcaaaatctggattttctcctgccatttttaccgcttcatcattggtgaaatttttaattccctgtttggatttcaggtgaaacttcacccagactctttcattctgagcattgatcatagagaacgtgtgagaaccgaaaccgtgcatatgtctgtgtccgtaaggcgttcctctgtccgacattaggataagaacctgatgaagagattcaggattcagactccagaaatcccacatcatggttgcgcttttcagattcgttttcggaactcttttttgggtatggatgaaatccgggaatttttttgcatccttgatgaaaaataccggcgtattgtttccaaccagatcccagttcccgtcttctgtgtagaattttaaagcaaaacctctcggatctcttgccgtatctgcgcttcctttttctccgcctaccgtggaaaaacgggcgaacattctgcatgaattgccaactttagaaaataattttgcttttgtatactgggtaatatcgtgggtaaccgtaaacgttccgtaagctcccgttccttttgcatgaacaattctttccgggattctttctcttacaaaatgagcaagattttcctgtaaaataaaatcctgcagcaataccggacctcttggaccgactgtctgggaatcctgatgttcgtaatatggagcgccgttacttaaggttaattttttagaatccatagatttatgatttttgtgaatgattttttaactgcttttgtttatgtaaaggtactaaatatcaaatttacttgaatttttaattgcaaatggcaaaaacattttatctttgtcatagataatattaatcagatgaacattcagcaactcgagtatcttatcgcggttgataagtacaaacattttgggaaagcggctcaagcatgcttcattacgcagcctacactaagtgcaatgatacagaaatttgaggatgaactggatgtgaaggttttcgacagaactacgcacccgatccgtaccacagatgtggggcttcagatcatcgatcaggcgaaggtgattatagaatctgtcaatgaacttaaaaataaagccaatcttttaaacaatattttagggggaaccatcaatatcggaatcattcctacggtttcttctttcatccttccgacggaaatctttaaatttttggaagaaaatccgaaaatccagatgaatgtaaaggaaatgacaacggacaacattatcaaagctttgaaagcaggagaattggatgccggaattatttccacgccatacgatgcagcggatgaattttatcaggatttcttattcaatgaagaattgatgatctacagttctgagaaagaagccaacaagaaaaattcttatgtggttcctgaagaactgaatgtagaaaaagtatggctgcttgaagaaggaaactgtctgagaaaccaattcgaaaatatctgtcatttaaaagaaaatacattaaagcctaaaaacttagattttctcgcttctaatatccagactttggttcacatggtggataaagtgggaggaatcagtattttgccagagttggctcttaaccagctttcagatgtacagaaggagaatgttttcagatttaagaagcctttcccgtacagagaaatcagcattatttactacaaaccgacctttaagcagaaaattattgatgaattatcgcattctatcagaaattctttagagaaaaaactgaattatcacgaaaatccgaaagaatttgtaagcataaaaccgcaatagtgttttatgttaaatatcatcaaatcattaatttaaagaagagataataagtagacaaaaattttgagtattaaaaaatagtacttaaatttgccaacgtttacgaacgaggaaaaatttgacctgattgcaacctctataaaaatatgctaaaacagtattcttttttagacctttattagacaatttattcttatttttcttcgtatatttttaatctaaaaacaaatagaataatatgtcttatttatttacatctgaatctgtttcagaaggacatccggacaaaattgccgatcagatttccgacgcattaatcgatcattttttagcatacgacaaaaactcaaaggtagcttgcgaaactcttgtaacaacaggacaggtggttttggcgggtgaagtaaaatcggatgcttatcttgatgtacagacgattgccagagaagttatcaacggaatcgggtatacaaaaggagaatatatgttcaacggagattcttgcggggttatttctgcaatccatgagcagtctccggatatcaatcagggggtagacagagcggtaaatgatgagtctttcgaagctaaagcaaacgcacagggagcgggagatcagggaatgatgttcggatatgcaaccaacgaaacggcaaattatatgcctttggctctggatcttgcacatactattcttaaggaactttctgcgatcagaagagaaaattcagaaattaaatatcttcgtcctgatgcaaaatctcaggttacgattgagtattctgacgatcataaaccaatcagaatagattctatcgtagtttctacacagcacgacgatttcggatctgaagaagaaatgctgaacaaaatcagagaagacatcaaaaatattctgattccaagagtcgttgctttacagacagaagaaattaaagcgttattcaacgatcagatcaaatatcatatcaatccgaccggtaaattcgtaatcggtggtcctcacggagatacgggtcttacaggaagaaagattatcgtagatacgtacggaggaaaaggagctcacggtggtggtgcattctctggaaaagatccttcaaaagtagacagaagtgcggcttatgcaacaagacacattgctaaaaatttggtggctgcaggagttgcggatgaagttttggtacaggtttcttacgcaatcggggttgcagaaccatgcggattgtacattaacacgtacggaacggcaaaagtagatcttaacgatggagaaattgctaaaaaagtttcaacaatcttcgatttgagaccttacgcaatcgagcagaacttaaaactaagaaacccgatctatcaggaaacagcttcttacggacacatgggaaaagagcattatattgccagcaaaactttcaataaaggtcataaaaatgagcttactttggataatcttgagttctttacatgggagaaattagacaaagtagaagaaattaaagcttctttcggaatttaattttaaacttatacaatataaatggctgctttatctttttgataaggcagttttttttatttttacattaaataaatttgaagatgacaaacgccagatctgcaatcgcaatcctttccgtatttttcctgagtacatttgctaaagcacagttaacggtacataaaatgataagtgtaggatatacttaccaaaaccaaagtttcggggaaataggagggaagctgcttttcttaaaaaatgatgatgttatttaccgtttgggaggttctgctttgatgggttctgcgcattcccaatttgcaattatgcccaaaatttctgcggatgttttactgaattttgaaaaaaatgtagacttcaaccattcctattatttgctgatgggagcagaaggaaccaataaatattttgctccaaaagtaggcgttacgcttttcgggattctggatcttaccggaggttatgcttttccgatcggaaacagcggaatcaatggtaaagaactgaaaggggtgaatgttaattttacactaaatatccctactgtattcattcacgacatgtttaagtaggtttttttaaatttttctcgtaaaaaattaataaatgattaacagttattaaaaatttattatatttacaccatagaaaaattgtatccgcctattgattcgactttactctgaagaattgttttgtatttacagctgaagccagataaaatatctggaaaaattatagtcagcattatttattgagaagaagttatgaaatcaaaatcggatagtttactaatttccctttaccaaaaaggagacgaagaggcgttgtctacccttatacaccgccatcaaagagaattgtttacattcattttttacaaaattaatgatgaagatttagcaaatgacgtatttcaggataccttcatgaaaattatcattatgctgaaggaaggacgctataacgaggaaggaaaattcattctttgggcaaaaagaattgctcacaatcttattatcgatcatttcagattgaaatctaaaaatatgaaggtttcagaaactacttttgaaacggacgaatattctgtttttgatcttttgagagagccttccgaaaatatcgaagatcagcttgttaccaaccagattcaggaagatcttctaagaatgcttcagtttctgcctgaaaatcagcaggaagtcattaaattaagattttttgacgggttaagtttcaaagaaattgcagaccataccgacatgagcatcaataccacactgggaagagtacggtatgctttaatcaacctgagaaaaatcatggaagaaaataatattatcttaacacgctagataataatttcggaaaattctcgtttttaaggaaaacattttcgcctatgaaaaaaaatgatcccttaaaagtgaaagctttgaaacctaagaaacaaactattgagtttttactcaacttttcaaagagcgtcgaggtagtgaaagccaaaggcaagaattatcctgtatccaagaattaaaattattaattttgtgctgtatgaaaattcagcacattttttttgatctcgataatacactttgggatcaccgccgcaatgcatatttaacgataaaagatctttttgagaaggaagaaatcggcttgaaatataatatcaattttgaagaattccattctgtttatcatgaaatcaatgaaaaactctgggaagatatccgcgatggaattattgataaagaatatctcagaaaacaccgtttttatgatacttttaaaaattttgaggttgatgatccggaattatcgatgtatttcgaggaacatttcttagataaaattcttaattataatgaactggtagaaggtgcagaatatattctggaatatcttaaagcaaaaaattataccctgcatattatttcaaacggcttcaaagaagtgacggagagaaaatgtattttatccggcattgataaatattttcagaccatcacaagcgcagatttagttggtgtaagaaagccacgtcccgaaatttttgaatattccctgaacctttcagaagccacgaaagaaaacagtattttaattggcgatgactgggttgcagatgttattggcgcgcagaattttggtatggatgttattttctttgatgctttaaaggaaaacaaatctgaagaaggcttgaaggtgattacgcatcttttgcagattaaagagtatttataagagtttcggcggcaccgaaggtgccgccgaaaattaattcaataacaataaatgaaaagactggtttttttgctgttttttagcattacaaatattatatctgctcaggaaaaagatcttgatcaggacggaatcccggattctgtcgattttgatactcagaaattgaaaattatatgtaaattatcatctttagattttaagccgatttacagtaaagaaattgaaacgtcgggtgattttactggagtaagttatacaaaaaatggttttgaattttatattgatttcatgagagcaggttattcggcgcagttcagatacgaaccaaaagataaaacaataaggctgattggaatgagtagatacgagtttggtcctgcaaataacgacggaagtggagaatcaagtgtaaatcttcttacagatgattatataggggaatggaattattatgatttagataagtccagacttattaaaatgcccacgattataacaaaattgacattcaaaaaaacttttctgatagattttgatgaatccgttctctatgattttggaagccgatgcagcgaattatatcttgctaaaaaagaaaaattaattcatagtaatcaaattcgaagtcacaaaaaataaataggcactcattttaatgaatgccgattttatttgaatgataagttattaaattcccagactttctctcactcttttcatcgtttccgtagcaatcactctcgtttttgctgcaccttcctgaagttttgtttccagttcatcaagattgttcatataataagaaaaaagttctctttctttttcaaatcttgttaaaataagatccagaagttcttttttcgcatgaccgtaaccaaagtttccggctaaatatttcgctcttaattcttcagtttgttccggagtggcaattaactgatagatggcaaaagttttatccgtttcgggatctttaggctcttctaaagttttagaatccgattcgatgctcatcacctgctttttcagttccttttcaggcaggaaaatattgatgatgtttcctcgcgatttagacattttgtgtccgtcaactccgggaacgtatttcgtgttttcctgaagctcagattgtggcaaaacaaaaacttcacccatctgattattaaatctggaagctacatcacgcgcaatttccaaatgctgaagctggtcttttcctaccggaacaatttccgcatcgtataataaaatatctgcagccattaaaatcggatacgtaaacaaacctgcattcacatcctgcaaacgatctgctttatccttgaatgagtgcgctaaagttaatctctgataaggaaaaaaacatgataaatgccaagaaagttcacaggtttcagggatgtcgctctgtctgtaaaaaaatgttttttcggtatctaatccacaagcaagccaagccgcagcaatctcgtaggtattctgtttcagttctttcgcgtcttttatctgcgttaaagaatgcagattcgcgatgaataaaaatgattcgtttccttcctgtttcgataattctatcgcaggaataattgcacccaacaagtttcccaagtgtggtgttccggtggcttgaatgccggtaagaattcttgacattgtttaaaatttatatttaaaaattaatgaactgcaaatttaattaattctccctcagattccatgaatttacagagatgtttatgttttattgtttgtggtattcgtgaaaacattagcgttatttgtgtttggaaaatttaaacgcaaagattttattcaaaagctattatttttagaaggcaaaggcaaataaatttgctgcacaaagcttgaaaacggagcttcatcaaatcaacttgttgatgcatctttgcacacttagaaaagtaattattatcaaattaaaaactttgcgttaaaaatctgcaagaaaaaaatattaaggaattaaaaccttatccccgccaaatttcggttcaactcctaaaagaagatcaagataggcttttgctttcgccagatattctctcagattcgtcttcagaccggcatatttattaacatccggagcattgtatccgaatgcttccatgccgttttgttgggctaaaaataccgccctttcattatgaaatttctgtgaaacaataattaattgattttgcccgaaaatctccttcgcgcgtacaacagaatccagtgttctgaaaccggcaaaatccagaaaaatattatcctttggaactccgtattccatcaaagccatttgcatatcttcaggttcattatagtttttctgactgttatcaccgcttacaataatgtatttcgcctttccgcttttatacaaatcggctgcagcctgaattctgttataaaaataagcattcggttttccgttgcttagtgtttttcctgttcccagaagcagtgctgttttcattgtaggaacttctgagatattgtatgaaatatgggcttcgctgtcttttttaatgctgtaattcgcccaggcaataaaaataattcctgccacaaaaagaagcaggaaaattttaaaaatgtttttaattaattttttcatcaacagtatattcttttaaaattccagaccgttcggaaatgctttttttctgaaaatcaataataaagcagctcccactgtaattgccgaatcggctacgttgaaaatatatttaaaaaattctatatgttttcctccgattaaaggccagctttcaggaacgttccagtctaccagcggaaaatgcagcatatcaaccacacagcctttcatgaaagtagaatatccttccccgaaactggtgaatttcgaaattcctccatacccgatccatctgttgatgctctcatcataaactgttccgctgtcaaaaataagtccgtagaacattccgtcgataagatttcctattgctccggcaaaaatcattgccatcggaatcagaagataattggattctccccgctgtaaccattttttaaacaaatagatcattccgccaatcaggataattcttaccagaaccagaaaatattttccgataatgcctccgaaatgaagtccgtaagccattcccgggttttccacaaacgttaatttaaatcccggaagcacagaaatactgtcatcaagattaaaatgcgtttttacataaatttttgaagcctgatctattaataaaataagcaaggttacaaatgctatcttcttcattataatccttttggtttgtaaggttttcctatcttttcgtttcttttgtcaacgatcttctttaccgttttctcgttgtgatgagtattcttggtatggaatttttcgaacttaatgttcatttctttcaaaacacttttcagggcagtaagctccattgcgtttttggtgtggactattatggattccattttttttaatttaaattttactttttagacaattcgtcaagtctttttctgtcttttgccgacagatcattcactccgttttttcccatcttgctcagaagacggtcgatctctttttccctttcccgtttatcagaattaaactgatcgtcaatcgtataattacgcttttcatccggaaagaacctgtttttaatccggtctctgttgaaaaatgccaatacgacggcaacgataattcctaaaattaataattcgctcatgggtagatattaaaaattaggtttataaagtattcctcgaaatacgatataaacccaaatttattgtagctaaccttgtggttatttctgcatatttttcgcttcgatgctcagcgtagcatgaggaaccgccaacagtctttccttcggaataagtttacccgttactctgcacacaccgtaagttttgttttcaattcttatcaaagcgttcttcaggtcacgtacgaatttctcctgtcttccggccaaaatagaattctgttctttactcaacgtttcagcaccttcctcaaatgctttgaaagtaggggaagtgtcatccgtaccattattctggtcgttgataaaactctctctgatcagttgtaaatccttttcagccttttctattttttccttaatgattgctttaaactcttgtaaatcagcatcactgtatcttactctttcgtctgacatgttcgtttctcttttttaataaaattatgaaatggaatttgaaaaacaataactataagttaatttttttcaacatttatcttaaaattaacctcatctatttcgatttcgttaaaatttgaaagtgaagatacaatttctattttatttgacaagacttcggatgaaatatattcttcatttttcttgatgtcatcaatgaaaggagcgttttcttccaaagagatcgtaattctgtccgtcaaatcgaaatctttctcttttcgcaggttctgaactctgttgataaattctcttgcgataccttcagattttaattcatctgttagcgtcaaatctaatgccacagtggtttttccgtcggaagttaccgtccatcccggaatatcttttgtggaaatttccacatcttccggtgtaatttcgtaaccctgcacatcaatttttccttctttttccaaagtggagatctgttctgcggtgaaattggtaatttctccgcccaccgttttcatgtcttttcctaattttggacctaaagctttgaagttcggtttgatctgttttacaattaaatgcgacgcttcttcagcattaattaactgtaattctttaacgtttacttcctgcttaattaaatctgcaaccgcagaaatctgctcttccgttttcttatccaaaacaggaatcaacactctttgaagaggttgtcttacttttaaactttctgcacgtctgatggaaagaaccaaacttgttatcgtctgtgctaaatgcgttttttcaaccaaatctgcatcaattaaactttcatcagcaacagggaaatccgttaagtggatcgattccgcagtttcttttccggttactttatttaagtcctgatacaactgatccataaagaacggagcgattggcgcagataatttagcaaccgtttcaagacacgtatataaagtctggtaagctgagattttatcttcagaataatctcctttccagaaacgtcttctgcaaagtcttacgtaccagttggataaattgtcattcacgaacgtattgatcgctcttgctactcttgttggttcgtaatcttcgtagaaccctttaacttctttaattaacaaattcagctcagaaagaatccatcggtcgatttccggtctgttctcaacttctttttcagaataattaaatccgtccacattcgcatacaatgcaaagaatgaatacgtattgtacaatgttccgaagaattttcttctcacttcatcaattccttcgatgtcgaatttcaggttttcccaaggattcgcattggaaatcatataccaacgtgttgcatccggaccgtaaaccgctaaagtttcaaacggatctaccgcgtttcctttggattttgacattttcagcccgtttttgtccaaaacaagtccgttactcatcacatttttataagcaacagaatcaaaaaccgctgttccgatcgcatgaagcgtgtagaaccatcctcttgtctggtcaacaccttccgcaatgaaatctgcagggaacgctttattattatcaattaattctttattttcaaaaggataatgcaactgcgcataaggcattgaaccggaatcgaaccaaacatcgatcaggtcgctttcacgcttcatcgcttttcctgaatctgaaaccagaactattttgtctacaatatttttatgcagatccacagacgcataattattttcagacatatctccgatgatgaaatccttaaacggattttcagtcatcaatcctgcttctacagatctttcaatctcgttgtataattcttctacagatccgatgatcttttcctccttcagatcttctgttctccagattggcaaaggaattccccaatatcttgaacgggaaagattccagtcgtttacattctcaagccagttcgcaaaacgtccttctcctgtagatttcggcttccagttgatttctttgtttaaatctaccaaacggtcttttacagccgtcattttcacaaaccatgaatccagcggataatacaatacaggcttgtctgttctccagcaatgtggatagctgtgaacatatttttctactttgaaggctttgttttcagttttcagcaaaattgccagttctacatcccatgatttttcgggtgcagttccttcatcgtaatattcgttcttgatgtattttcctgagaataattcaggaacattttctcccttgataaatcttccctgtaaatctaccagcggaaccagattatcattttcatcttttaccaacatgggcggaactccggcttcttttgccgctttcgcatcatccgcaccaaaagtaggcgcgatgtgaacaattcctgttccgtcttcagtggttacaaaatctcccaagatcactctgaaagctttttcaggagtgtcgtttggagtaaaccacggaaccaactgctcgtattgagttcctgttaatttttctccggtaaattcttttaaaatcttgtaaggaatggttttgctttccgaagtatagttcgcgaaatcttcatctgttccttccgcatatttttttccgaaatttttattcagaagaacttttgccagaacaacagttaccggctggaaagtatattgattaaaagttttaaccacaacatattcaatgtctcttcctacagccaaagccgtattggaaggcaaagtccaaggtgttgtcgtccatgcaagaatgtttacgtctccttcaacatcattaaacagatcggtagattctttttttaccttaaactgcgcaacaatggtagtgtccgaaacatcatgatacgttcccggcatattcagctccgcagaagaaagtccggttcctgctttgggagaatacggctgaatcgtgtaacctttatacagcagatctttgttgtacaattgtttcagaagccaccaaaccgtttccatgtattttgatttgtacgtgatgtacggatcatcaagatctacccaatatccgattttctcggtaaggttattccatacatctgtataacgcattaccgcttcacgacatgctttgttgtaatcctcaattgaaatttttctgccaatatcttctttagtgattcctaattctttttccacaccaagctctaccggaagtccgtgcgtatcccaacccgctttacggaaaacctgctttccgttttgggtctgataacgacagaaaatatccttcaacgctctggccattacgtggtgaattccgggcataccgtttgctgaaggcggaccttcataaaacacaaactcaggttgcccctcacgaatctcaacactcttattgaaagttttattctgcttccagaattctgcgatgttctcggctacgtcaataaggttgaggtttttgtactctttaaattggctcattgtaatatatcaatatcgttgattaattaagttggcaaatttactaaaatttgtcggtttataatatatgttttattttgatatttcctattaaaaacttctgtttcagaaaaataaatgaaaagattaattttttgtgaacaatcaggggttaattataaacttttgaagatgtttttaaacccaaatagcacgaatgttttcacaaataccgcggatttctcatggatgtgtatcgataggggcgcgggctttagcccgcttcaatagtagtatttcaaattggttttaaccgaaacttacattttcgtttataaatttaaacgcaaaatttatttataatgatactactttttccgatgagcaaagagttaatccaaatgttgatctgataagcgatatttccaggcttcgctaactttgtcttctaaaataaaaagaatgcagaacaggaactttgcgttaacacttatcgcaaaatacttttcacgaataataacaaaaacaagtcattatcgaaatccgcaggaaaataaatctgcataatcagcaaaacctgctacaaattaaaataaactaataaatttgtcctttaaaaataaaaaccattggacttttatccatccatcgaaagatcagacattcaggaaataaaaaagtttcaggagcagaagcttcaggagcttttaacgtatcttgaaactcattcaccattttatcaaagattattcaaagaaaaccatatccatattgctgatattcagactttggaagatctgaaaaaaattccgaccaccacgaagaacgatattcagcagcataacgatgattttttctgtgtgacacccgataaaattgtggattatagcacaacatcaggaacgttgggagatcctgtaacgttcggattgtccgataacgatcttgaaagattagcctacaacgaagccatttcttttgcctgtgccggaataaaaaaaggagatgtagtacagatgattaccacgatcgacaaaagattcatggcgggacttgcctattttttaggactcagaaaaatgggagcaagcgtggtaagaatggggccgggaattcccgaacttcaatgggattctattttcagatacaaaccgaaatacttaatcaccgttccgtcttttttgctaaaaatgatcgattatgccgaaaaacacgggattgactataaaaattcaagtgtttatggagctgtgtgcatcggagaaagcatcaaaaatcaggattttacagataatattctttcacagaaaattaaagaaaagtggaatattaaacttttctcaacctatgcttcgacggaaatgagcaccgcttttacagagtgtgaagaacaaattggcgggcatcaccatcctgaattaattatcaccgaaattcttgatgatgaaggaaatcccgcgaaagaaggcgaaagcggagaattaacgatcactactttgggcgttgaagcaattccgttgttgagatttaaaacaggagatattgtaaaagcacattatgagccttgtaaatgtggaagaaatacaatgagactcggacctgtcatcggaagaaaacagcagatgatcaaatacaaaggcactacattgtatccgcctgcgatgaatgatattttaaatgattttaataaaattctctgttatcagattgttattcagtcaaacgaaatcgggttggatgaaattatcattaaagtaagcacagacagcgattccgagggttttgtaaatgaagtaagagaccatttcagagcaaaattaagagtgagtccgaaaattgaactggtagattttgatgttttatctaaaacggtatttaacccgaacagcagaaagcctataacgtttgcggatttaagataaaggataaataaaataaccatgagaaaaacgatatttctatttttagtagctttctcgtcatgcttaatggcacaaagagtaaaggtcattactggagattataattttttaaaagatcaaaaattcattaaagttgttttcaaatttgaaggtgttacttttgctaaaaagaaaattacagaagaacaatatatcaatgagagaatgcagaagattgaaaagagggcaggaaaaaaagaagcagaaaaatggaaaaatgactgggaattttcaaaatctaaaacttttcaggataagtttttagcttcatggaataagaataccaaaattgaagcatctactggtttcaaaagaacaaaatacactctaattgttgagccgacatggatctctcaaggtatttttggaggaattggaagtatccctgctgaaatgaattctacaatgacttttgtagagtcagaaaatccaagtaatattttaatggttgttgaaggaataaaagcaaccggagataatgggattggaattccaaataataatgatcgaattgcagaatgttacgcaaaaacgtctaaaatgttagcgttaaaagtagatcattatgttaacaaaaatagattttaaaatttaaataaacgatgaaaaaaacattcctatcctttctggtttttttagcttgtgttctacatgcacaaaagatgaaagtgatttccggaaatttcgatttcctgaaagggcagactgaactgaaccttaagatggattacagccacataacattttataaagaaaacatagatgaggcaggctacattgccaaacaggaaaaagcgatccaaaaagcaggaaaaagtcctgaggaatttaaaaagtggaagaaagactgggaatattctaaaaatactcagtttgtagacaaatttttagcatccatgagtaaaaacacggatattaaaacttctgtgaacgattcatctgcaaaatatactctcattgtagaaactgtctggatttatccgggatggttcggaggaattatgaaccagccttcaaaactgagtacccttttaaaatttgtagaaacagaaaatccgtctcatgttttactggaaatcgaaagtaagaatgctcccggcgataattttgtgggacttccaaataataatgacagaatttcggaaggatatgccaaaacagcaaagactttggctcatatgattgaaagagagatcaaataaaaagataagaaatccgcctctgaaataggaagcggatttttttatgcttgttgcttttctgttttaataaattctgccagatttttaatcgctgtatcatgaattctcacaaaagtattcttcttattccagacataacccgccaaaactgcacagatttttcttttcacatctggattttccggctggtggaaaaataattcctgaagatttccggtgtaccattctttcacatacgttgtgaaaacatcaacgccgtataaaatatagtctgcaaattccttttgccagtctacttgttcgccgttcagttgccttaaggctaattttgctgcggtcattccgccttctgtagcaaaagccattcctgaagagaaaaccggatctaagaattccgaagcatttcctgtaagcgcaaaaccgtcaccatacaatttttttaccgagcacgaataatctttcagatgttgaggttcaaaaagaaaatctacatccccgaaacgttttacataataatccgaaagggaaattgctttcctcaaagcttccgttgtatcgccgttttcagagagtttatcaataaaatcggttggtcctacaattcctacacttgtgtttccgttagaaaaaggaattacccaaagccagacttccgtttcgataatatcaaaagaaatcagagttccttccgttccttcttcccggttaatgtcttttacgtgagaaaaaatcgcagaatgaggagaaagctttgaaggtttttctaaatccaaaagtctcggtaaaacccttccgtacccgctggaatcgatcacaaatttggcatgaatttcttttatttcgccgtctttattttttacagtcgttacagaatctgttccgttgaactcaatgccgattacttccgtttcgaattcaagatcaattcctttattaatgacttcctgagctaaaacattatcaaaatccgctctcggaacctgccatgtccagtcccatccttccccgaatttattactgaaatcaaaaatacagacctcgttgcctcttaaaaaacgtgctcccagtttcttctcaaagcccattttatcaagagcaggaaatagtccggcttcatcaaaatgatccatcacacgcggaattaagctttctccaacaaccagtctcggaaatttcgttttttcaacaactttcacgttgacgttgttcttctttaaatatgaagaagatacgcagccggacggtccggcgccgattacaagaacgtcaacaaattctttactcatctttgattttttattttaataataacttctatctttgccgcaaaattaatgacaattaattaataattacaaaattatcttattactttttaattgatgaaaataaataactttttagaactgagcgactttaagaaagtcatcatcaacaatgagaaaatagaactggatgaaacacttcttgccagagtggatgaaagttttcagtttttaaaagaattttcaaaaaataaagtaatttatggggtgaacacaggtttcggacccatggcgcagttcaaaatcagcgatgaagatacccatcagcttcagtataatcttatcagaagccattcttcggggatcggaaatccgcttcctgcagacgaagcaaaagcctgtatgctggcgagactgaataccttatcattaggaaaatcgggcgttcatcattctgtagtaaatttacttaaagaattaataaacagagatattacgccgcttatttttgaacacggtggagttggagcaagcggagatctggttcagttggcgcatcttgcgttggtattgatcggggaaggagaagtttactacaaaggagaaagaaaatcaacgaaagaagtttttgaaattgaaaacttacagccgattcaggtagaaattcgtgaaggactggctttgatgaacggaacttccgtgatgtccggaattggagttgttaatgcgcataaagcgaatcagttaactgatatttcaatcaaattatcttgtgcgatcaacgaaattgttcaggcgtatgatgatcatttatctgaagtgctgaacggaaccaaacttcacgaaggacagcagaaaattgcagaaaaaatgcgtgctcatttgtctgacagtcaattaatcagaaaaagagccgatcatttatatactcactttgaagagcaggaaaaagttttcaaggaaaaagttcaggaatattattctttacgatgtgttcctcagattttgggacctgttctggatacgttggaatatacggaaaaagtattggaaaacgagatcaattcagcaaatgataatccgatcatcaatgtggaagatcagcacgtttaccacggtggaaatttccacggcgattacatttcccttgaaatggacaagctgaaaattgtggtcaccaaattaacaatgttggcagaaagacagcttaattatttactgaattctaaaatcaacgaaattttgcctccgtttgtgaatttaggcaaattaggattcaatttcgggatgcagggtgttcagtttacagcaacttctacgacggcagaaagccagatgttatcaaacccgatgtatgttcacagtattcctaacaataatgataatcaggatattgtaagtatgggaaccaatgcagcggtgatctgcagaaaagttatcgaaaatgcatttgaggtattgacgattgaagcgattaccattgttcaggcaatagaatatcttggttttcaggataaaatttcatcagcaaccaaagaattgtacgaagaaataagaaagattattcctgcgttttctgatgatatggtaatgtatccttatctggaagaagtgaagaaatatttaaaggcaatgtaattttttaaggaaattaattgtcatacttaaggaaaggaaaatatatataaaaaactaaaactacataagcaacacatgaaatgtgcaatcgtcacaggaggctcaagaggaatcggaagagcaatctgtataaaactggctgaagaaaaaaactatcatatcttaatcaactacacttcaaacgaagcggcagctaaagaaacgctggtcaaagtggaagaactgggatcaaccggagaaattttgaaatttgacgtaggaaatgccgaagaaactcaaaaagttttaacagaatggcaggaaaataatcctaaatccgttgtagaggtgatcgtaaacaatgccggaattacaagagacggattgttcatgtggatgccgagtgaagactggaacgcggtgattaacaccagtttaaacggttttttcaacgtgacaaatttctttatccagaaactgttgcgcaataaatacggcagaatcatcaatatggtttctgtttccggagtgaaaggaacggcaggacaaaccaattattcggcggcgaaaggagctttggtaggagctacaaaagcgctggctcaggaagtggcgaaaagaaacatcaccgtaaacgcggttgcaccgggattcataaaaacagacatgacgcaggaatttaacgaagacgaattaaaagcaatgattcctgcaaaccggttcggggaagcggaagaagtggcagatttagtcgcatttttagcctctaaaaagtcatcgtacattacaggcgaagtcatcaatattaacggaggaatctactcataaaatcaggtggcagataaaaggaagcagttgtgagctgcaacccaaaacctaaaacctaaaaccttgaacattacatggaaaatagggttgtcattaccggaatgggaatttattcctgcatcggaacttctttggaagaagtaaaagaatctttatttcagggaaaatccggaattcatttagtagacgaaagaacagaatttggtttcagatcgggattaacgggcgtggttccgaagccggatctcaaaaatcttctcagtcgcagacagcgcgtaagcatgggcgaagaaagcgaatatgcctatatcgcaacgcttgatgcactgaaacaggcaaatatagaccaggattttttagataataacgaagtcggaattttatacggaaacgacagtgtttccaaggcagtggtagaatcgatcgatattgcgagagagaaaaaagatacaacgttaatgggttcaggagcgatctttaaatccatgaactctacggttaccatgaacctttcgaccatttttaaactgagagggataaatttaaccatcagtgcagcctgtgcaagcggatctcattctttgggactggcttatatgatgattaaaaacggttttcaggagatgattatttgcggaggagcacaggaaaccaataaatattcaatggcgagctttgacggtttgggcgttttctcagtacgcgaaaatgaacccacaaaagcatcaagaccttttgataaagacagagacggattaattccgagtggaggagcagcaactttaattgttgaaagtttagaatctgcccaaaaaagaggagccaatatcattgcagaaattgtcggatatggtttttcttccaacggagggcatatttccactccaaatgtagacggacctgctttagcaatggatcgcgctttgaaacaatccggattatcggcaacagatatcgattacattaatgctcatgcgacgtccacaccaattggtgatgccaatgaagcaaaagccattcacgaaattttcggaagcgaagttccggtaagttcaacaaaatcaatgaccggtcacgaatgctggatggcaggtgcgagtgaagttatttattctattctgatgatgcagaacgattttgtagccccgaatatcaatctggaaaatcctgacgatgaggcgaaaaggataaatttggttgctgaaacaaaaagtcaaaaaattgatgtatttttgtcgaattctttcggatttgggggaaccaactctgcattaattgttaaaaaatttaattaaaaacatggaaagggaaaagattattgcgatcgccaacgattttttagtcaatgaatttgaagttgacggcgatgaaataagcaatgatgaaaactttaaaaaaacgttaggcttagacagcttagattatattgatcttgtagtagttattgaatctaatttcggagtaaaattaggtgaggcagatttcaaaaatatcgtgacttttgacgatttttataccgtgatcgaaaacaagattactgaaaaaagcctataattgatttagcttctttgctgagtaaaacgtccttgcgaacttaaaaaacaggtactagttaaaaatttcttgcgaactttgcgttaagaacataaaaatatgaacaagtggaaaggtaaatctaaagggacgattctgggctacaaaattttcgtctggtgcattagaaatatcgggatcagaagttcatatgtagtgctttactttgttgcgttctattattttttgttcgaaaaaaacagcaacagatactaccgttattatttttcagaaagactgaagtatgatttctggaaaacaaaaatttctttattcaaaagttatttcacgttcggaaccgttcttattgataaaactgctatttcagcaggattgcgcgataaatatacctacgaattcgatggcatcgaaaacctcagaaaccttttagccgaaaaaaaaggcggcgttctcatcagtgcgcacatcgggaattttgaaattgctgaacatttttttgctgatatcgatttcgactgtcagatcaacttagtaacaacagatcaggaagttacagtcattaaagaataccttgaaagtgtttccgtaaaagcaagcagcattaaattcatctacgtgaaagaagatatgtcccatattttcgacatcaatgaagccttgtctaaaaacgagctcatttgctttaccggagaccgatattttgaaggatccaagtttttagagggcgaattgctgggtaaaacagcgaaatttcctgcgggaccctttcttattgcatccagattaggcgttccggtcgtatatgtgtatgtgatgaaagaaaaaaatctgcattatcacctgtacgcaagagttgccgaaaacgtcaaaaaacgagatgcacagggacttttgaactcttacacccaaaatctcgaatccatgatcaaaaaatatccgctccaatggttcaattattttgatttttgggacgatattaattaaatttcctacttttaccttcagaaaactaatatttaactcaaacattaaatgatttagagatttaaaagaaagtcctaagtttccttttatctttgctgagtgttaacgcctttgcctcaattttatgattgattcattggattcggcgaaacttcgttttgcgaacttaaaaacaggaagcgattaagaaaaatctttgtcgactttacgttttaaatttcaaaatcataaaagacactttcctccttgaaaaaagaatttgacatactcgtaatcggcagcggattgggcggtcttgtttcagcgcttgttctggcgaaggaaggtttgaaggtatgcgttctggagaaaaacaaccagtacggcggaaatttacagaccttttcccgcgacaaactcattttcgataccggagttcactatctcggcggactttccgaagggcagaaccttcatcagtatttttcctatctggaaattatggaagaacttcagcttcataagatggatgagaacggctacgacaaaatcactttcggagacgatgaaaccgaatatcctcatgcacaaggctacagaaattttgttgaacagttatcagaatactttcccgaagaaaaagacaatttagaagactattgtgaagaaattcagagggtttgcagccagtttcccagatataatcttgtgggaaaagacaattataacgaggaaattcttcacttaaataccaaaagatttattgaatctttaacctcgaataaaaagctgcagtccgttttattgggttctaattttttatacgctggagattctgaaaacgttccgttttacgttcatgcacttaccgtaaattcttatattcaaagtgcttacaaatgcataaaaggaggaagccagatttcaaaactgctgattcgcaggcttcgtgaatatggagcagaagtacacaaacacgctgaagtttccgaatttatttttgatgaaaacaatatgttatccggagtaaaaacttcagaaggaaaagaatattttgcgaaaaaattcatctcaaatattgaaattcggacaaccctgaaacttcttggtgaagaaaggcttaaaaaatcatttgtcaacagaattataagttgggaacctgttccgtcgtgtttcagtgtttatctcgtgatgaaaccgcaatcttttcagaatttcaattataatatttaccattttgccaatgaggaaatggtctggaatgcccatcgttatcaaaaagaaaaatggcctgaaacgtatatgctttcttcaacagaatccagacacaatcccggtttttcagaaagtcttaccgccatttcctacatggattttcaggaagtggaggagtggaaggaaaccgtcaatactgttgcagacgaacacgaaagaggagagttttatgaaaaattcaagctggaaaaagctgaaaaaatgatcgatgctttagaaaagaagtttcctgatttaagaaaatcgattaagtgtttttacacctcttcaccattatcttatcgcgattatatcggaagttttaacggaaatatgtacggttacatgaaaagttctgaaaatcctctgaaaaccatggtttctccacgcacgaaaatcgacaatctttttcttaccggacaatccgtcaatatgcacggaattttgggctgtacgatcggcgcattcaacacctgcgcagaaattctcggaaaagagctgattgatgaaagattaacacaattgattaataaaaataaaggtgaaaaataaaggtaagactaatgtgcagtctgtcattctgaacgaaacgaagtggaatgaagaatctaaacgtaaaaaaatagatttctcctttcgtcgaaatgacaaagctctaatcttaatttttctcagtctaaacctttgccttttcctcaactcttgcggaataagaaaatccatcaaacatattcccgatgtaaaacaatattcgcttgatgttccgaaggttaataaaataaacgattccactttcagtttcaatcagaattatttaacaaaaaataagcagcagatctgggaattgtatattcagggaaatcctctgcaattaggctacaataacggagctttaacccaaaatctgatgcagaaacaggaagaaattttcttttccaaaattgaaggatttgttccgtcaaagtttaaacaaaatttactgcgaggtttcctgaaatggtacaaccggaaaatgtatcttaatgtaagggaagattttcaggcggaaatctatggaatgtctcaatattcttcggacaaatataattttatcgcaccaaagtttctgcgaagtatgtatctccacggtgcgcacgacattggtcatgccatgcaggatttaatgatggtgggctgtacttctcttgcggtctggaatgaaaatacggaggacggagatttattgatcggaagaaatttcgacttttacgtgggagatgattttgctaaaaataaagtcattgaattcgttcagcctgatgacggaatcccttatctttctgtgacttgggcaggaatgatcggcgtagtttcagggatgaacaaagaaggaattaccgttaccattaacgccggaaaatctaaaattccattggctgcaaaaacaccaatttcattggtaacaagggaaattttacaatatgccagaaccattgatgaagcaattgccattgcagaaaagagaaaagttttcgtctcggaatctattctggtcggaagcgcgaatgataagaatgcggtgataattgaagtttctccggataattttggtgtttacaaagtggaaaatacaagccgtattttctgtaccaatcatttccagtcggaggcttataaaaatgataaaagaaatctgaaacatattgcggaaagtcattcagaataccgttatgaaaaacttaaagaacttttagcggaaaataaaaagctcaatcccgaaaaaatggctgcgattttaagagacaaatccggcttgaaaggagagaagatcgggtttggaaacgaaaaagccatcaatcagcttattgcgcatcacgctgtaattttttcaccacagaaaaaactggtctgggtttctgcaaatccttatcagttgggagaatttgtctgttatgatctgaatgaaattttttcagataaaagattgaaaagtagtgggtttgctaagtctgaattgaatattccaaaagatcctttcattgattctcaggaatttaaaaattacgaagaatataaaaaattaagctctcaaattgaatattcaactgatgataaagagaaagtattttcagaggaatttattaatcattatcaatctttaaatcctgatttctggcttgtttattttcaggcgggaaaatattattttaacaagaaagaatatgcaaaagcaaaaactgaattcgaaaaggctttaaccaaagaaattaccacggttccggatagagaaaatgtggagaaatatctgagaaaaacagtaaaaaaactgaaatagcgggtttaatttttatcagggctcaccttattcagaaaaagaaaagttgcaacacctaaaatcgcagaggcagaagtcgccagaataaagcttccgataacgtactgcaacagattattttttaccagatcgaagttcagttcctgactgaaaatattgctgtctccatgcacaaaaggagaacccaaaaacagcgaagcggcaataatgaagggaataaaaggtggtaaacttacattggatgcaaaaaaggcaagcactttattcagcttgaatagtacagaaagagaaataacaatcagcgtatgaaatccccagaacggagaaaagcccacaaaaacgcccaaagcaatcgaaaaagctttaattctgttgcttccgtcactttccagaacatcttcttttatgaatcttttaatgcttttttttttgaaattattcacgaagtttcgcggaataatataaagcaaagtaatggttaccagaatggtattcagaatactgatcctcgtaaaatctttaaacggtctgaagtgagaaactctttctgtaggatcgtaaagaaccttcaccggaacattttttaccggaatgtgtctccaagctgttcttacaataatttcaatttcaaattcaaattttggcgtaaaatatttcttgggaattttgtgtaaaggatataatcggtaaccggattgggtgtcttcaagtttgattccggtttcaaaccagaaccagaaattagagaaacggtttccgaaactgcttttcttgggaattccgtcctgcgacatatttcggttcccaatcaataaaacatcttccttttcattcagcaaagcctccacaaaaacaggaatatcatccggataatgctgtccgtcggaatcaatcgtgattgcataattgtagctcagttctttagcctttctgaaaccgatttttaaaccatttccttttcctttattctccggtaaatcaataacttcgatctgcgaataacttcttaaaatctctttcgtagcatccgtagaaccatcatttacaacaataatgtcttccgtgtaatccagaacaccgtcgattacccttttcagagttttttcattgttataagtaggaattaaaacacaaattttcttttcagagattgcatttcgtacttcagcaaggttcatgtaaatgattggttaatagtattttatttaaaatttaacttttcagtctccgtcatggttttagactgtgctgcaaattttttaatataactttttaaagcagaattctgtttgctgtaattattgatgagaaataccttatcatctttaaggcttcctctgtaacctacaattttcggaatgttttcctgaacactcatgcggatcagtcttaattcagcattattcggattgcttttaataaccgcttcaagattggttgctccggattttaccaaagcttttcggttatttttggaaatttttgcctccataatctgcgccgccgctttatatccctgaattgccgcatccgatcccgaagttttttcggctaaactgatgaacgcttctgtattggcattagagctgcttgctttggtgtaactttctctcagagattcaagacccgactgaaaaaaaagcataaaagcggtgataagtgaaaataatactttcattatgtcaatttttgataatttaccgacatttttaatgcaatagtctcgccaaaagaagtcgtgttctttacctttacatctccttcattctcagtaatatcgagctgaattttaagatccggcgtttcaaaaggattgatgattgccataaactttacattcgatgccgtttttaaaaataatgaagatccggtaaattcttccgtaagttccttcacgatctgcatcatacaaactcccggtgttacaggatttcccggaaaatgtcccttaaaaatatcgtgatctttattcagggaaatctgcgcggtgaaacttccgctttctgttttttcgtaggattgtaacgtataaaagtctgtaagtattgtctgcatgatgtattctgtttcagttgtttgaaatctttttctgaattttaaaatttcaaaaaatttaatatttaaaccttcgcgaatatatgtttttttgaaaggaaaagaaaatggttttggtcatcaacatcaattctatttcttaaaatggaacgtgtaataaccgccaatctgaaaaaccatatttgaattggaaaacaggaaagaagaattttcgtgatccagcattgatgcaaaaccttttttaattcttacttcaacccccagatttttaaaaatatcataaccaagacctcccgaaaaaccaagatcgagtccggaattgttctcgccgacagccaaatccagaaacggaccggcaaaaacactaaagtttttgatgtaaattttgtttgtaagctgtactccgataaaattgtaatgcagtcttttttccggaagaactccgttttctgtagtgtactgtaaattggttccctgtctggaatagttaacttccggttgcaaagcataacgttctgtaaatctaatatttccctgtaatccaaagtagaaatcggttactgttttcagacttgtatgagttactttttccgggttttcatcttcatggagataaaaggtttcattgcttcggttcgtaagattggcaaaatttattcccgctcttattccgggattgaaagtaacctgagctgataaaaatccggagatcagaatcagcaaggcaaaaatctttgttttcatgtaaggttattggttttcggtgatctggaatagttttatattgattttaaaatctttatgttgtaaattaagactgtctgcaaacgtatttttctttgcatcaaatgtaaaatcgatcttttccttcttgtttttcgtgtaaacgatttgttttaacagattattttctttgttgaagaacaaataatatcttgtcttatctattttagaaaggtaaatcttagaattttcgttttcaaaactttctgttaccggatatttctgcttcagaagctgctgaaaatcattccttaaaaaattaatcacaatctttctatccagatcagtaagaacataattcagcttaaaatcatcctcagaaatctcaaaatcaatcagtttattcccaaaatcagaagtcagaaccacacgatgtgtcgtttcgctgatttttttgataattaaaattccacttacatgatttttataaatatccatctgacatttatacagataatcttctttggatgaaaaatataaattttccaccgttttttcagaaaacggaatcggttttacatcagtaagcctgtacgttttacacgaagtaaacagaatgaaaatcaggctataagctaaattccgaagctgcaacaggcgcattgatcttggtgtttttaaaaacaatattcgtggtgtctcccgaagcttccgtcatattaacctgtgaaaccgtagattgatttttaggaaaatgcagctcgatctgcttgatatattttaaaagctgagccgatttcggagtgaatttagcaatgtttgaagtcgcattcttcaggtaagaaacagagaattcaggatcgttgaacatctgtccgtttgagcttccaacaataagtttgttgattttttcaaatgttttgctttttgcatccaccgaagattttttaccctgatcattaatcaatattttgttgtctttaaaaacaatactgtattgatagggttttgtgtacttccaactcagcatattcggtgttttcagagacatttttccgtaggtgacaatgttcttatctaaaaaatccatctttttggtctggataaaatctgcctgtaatgtttttatttctttggtttccgaagaaactttggttacaaacgctttcgcttccgctcccgacatcgccgtgttttgagcaaagacaaaagtcgaaattaataaaagagtgcttaaagctatatttttaatcattgtttaacgtcttttaaatttaaccacatggatgacaagggtttcacaaaggacactattaaagaatatttattaataattcctgtcttcctggtgaaatccttttggacttagtggctttcaaacttatcaattgtaaaagttgaataatttttctgcttcaaaaatactaataaatcctccaaaacattgtacgttttttgtgaagtatcgtgaagaagtacaatgcttcctttttttaaatttttcgttactttctggtagatttttttctcatcttctgtcatcgtatcaagagaacggacgttccatccgatgctttttttgccggtttttatgatggcttttgcaatattcggattggtaactccaaaaggcggtctgtacaaattggtttttaaatttccagttttaagcatcacttcatcacatttctcaatttcctcaaccatttttgaagtcgataaaaatccggtattgttagaatgtgaaagagtatgatttccaacagtatgaccttccgcaatgatccgttgaaaagtttcaggatatttttcaatctgttttccgatacagaaaaaggttgcttttacctcgttttcttttaaaagatctaaaaaattgggagtgaattcagtcggaccatcatcaaaagtcagcgctaattctctgattttcgtttttttatgggtaatgctgttgacaaaatatcccagttcaatatcgaaagaaccccagattacaagcgcagaaaacagcaaaaaacagaacagatacacccaaaaacttccgtgaagcgcgaaaataataacgttgcagaaaagataaaataagataaatagatagtgtttcatctttattgtctttaaattttggatttaaaatattcacaatctgtatctatgctgtcattctgattggagctaagcggaatgaagaatctcaaattaatattcttaatgtttacgttacaattaaccattaagttttagtttagaagttaagattattaagagatttctccttcgtcgaaatgacaattatgctgtttttctttgctaaatagaatactaatcctgcgaacggagcctattttcaatcaaacctaacaggtttcaaaaacctgttaggttttacttttaagctttccccaacaaaacaggagtgtgatcgttttctcttaaatgattgtaaaacaagatgtttttactttgttttatattccaaaccaaacaagtttcaaaacctgtgaggttttaatttttaagcctttcctaacaaaaccagacagtgatcgtttcctcctaaatgattgtaaagcagaacatttttaatttcttcttttttaagatcgttaattagcattacttccggaatctcctgatttttaagaatatgacaagccataaacgtcgaaaaaccactcgccgtattaaattcaccactcaaatgtttataatacagcaaagccgaattttcaaacagatccatagcatttttgtaataaacatccgattttacatctccgctgaaacctaaaataaccgcatcgatatctttattcgtcaaattatttttagctaaaaaatcttcaataaactgctgagtttcttctaaatctaatttgtttgtgatctgaatatccgttaattgagcgtaagagttttctgttttatcttttcctaagacaaaaaaacttgcgccctctccccaaatgacgccttctgttttagaattcagaaaatcaaccggaagattttcttctattttaatggttttatttaatttgtacagttccatcactctttcggtttgttcgtcggtagaacccaccaaaacgttttcagcttcaccgtcattgatttgtaattttccatccaaaaaggaaaattccagagatgaagaagaatttacataggtgaaattgtacgcatggcattgcaaacccaaagcaatttgtcctgcaactgtattgtgagtagactgaataaaataggtcggagtcagaaactcttcatgattatccagcacatttttcagaaacttttcagaatcctgagaacagcccattccggttcctgtgatgatcgcatctggattttcaattcctgcttcttttaaagcatattgagaagctacggaactcatttttaccgttttagacattcttcggatcattgccggaggaatgaattctttgtaaacaggttcaattgcttttaaaacctggactgaattttcaggtttgagattacggaaaaaatcttcatttaaagtgtcctgagctgaaatacaggctgcactgttgatgtaaacggcactcatgattttgagaaaattaaagtggaacaatttcctccaaaaccaaacgaattggaaagaacgtggttgatatttttctctttaagctccgttacaggcgttaaatcaaactctgccatttttgttttaaagttcagattcgggaaaatgatattattttgaatcgccaaaagagaatagacggcttcaattcccgccgccgcagccagcgtatgacctgtaaatgcttttgtagaactaaattccggaacgttgttttccccgaaaatccggatcatcgcaattccttctgataaatcgttatttggcgttgccgttccgtgaacgttgatgtaatcgatgttttctttatctaagccagaaacttttaatgctttttccatcgctaaataagctccctgtccattttctgaagaagcagtttggtgatgtgcatcattggcatttccgtaaccggagagataacccagaacttttttattttctttttttacgacttcatcagattctaaaacgatgaaagcggcagcttcacccagattcagaccttttctgtcgttgtcgaaaggggtgttgtaagaatccgtaagaatcatcaatgtattgaaaccgttcaaagtaaattttgaaagagaatctgttccgccgacaattacacggtctaaaacaccgtttttaatgagttttgcgcccatcataatggcgtttgccgccgatgaacacgcggtactgatggtggaaaccataccttttaatccgagataatcagcgattaacaaagacgaatttcccgcatcgtgagagtcaatgtatttttgcttttcaggaaagtcttcgtaggaatagaaatatttttcggtaacatccattccgccaacgctggtcgaagaaatcagtcccgttttatattcattgatatccgaaattccggcactttccacggcttcttttgccgccatcattcctaacagagcggttctcgttgcatgatgatcttctttgagctgaagttttgcggcaagttcctcattagacaatttgatttcacctgttttgatgtttcctttatgacgtgtttcaaacaaagtaatgtccgaaatcccgtgctttccggaagtcagcgaactcagattttcctccacattgtttccaatggcggaaatgatgcccattcctgttatggcaattttttgacccatcttttaataatgtaccaatgtatcagtttaacagcataacaatattggtacattgctaaattgatacattgttagattgaattattttgttctgttttcttcgatgaattttgccatggtttcgatggacgtaaaaatctcctttccttttttcggatcggctaattttattccgtattctttatctaaaagaacgatcagctccagagcatcaatagaatccaaaccaagaccaccgccaaaaagaggatctgtgtctttgatttcttctactgcaacgtcttctaaattaagaacttctacgattttgtgttttaattcttctcttaagttttccataaaattaatttgaaaatatgttaatgagacaatttgaaaatgtattaaatgttatgccttattgatatgtttttacatgttcaaatcagcacactttcaaattatcaaatttataatgtcagcaaatatacaaaagctttgtaactttcctgatatagttctacccagccgcacaatactttatctgcctttccggactgtaaaagctgtgctgaataattgtttaaaaattcttcatccaattcatccaaaacaaaaaacgcattttcggtctgcattttgtgtctgatgctgatttcacccacgcagatattcggtaaagtatacacaaaaactgcgggactcggaaagtaattttcctgagaattgatgctttcctgatatttaaaatcggtatctaagcttgatgatttattagcaaaaaccaatgctgttctgctttggtcttcatccttgagaataatttcagaggcaagaaaagcgagtttgcttaaatgatccattttatgaaatttcggataattcagctctaaacttttataagcttctttcgcaaagtctgagaagttttcagtgggggtttcaaaaataacctcgttgttgagaactatttttgaattttctatggtgcagatgtctgttttcttcatgagtaagtttcaaaaagattagggcttttttgttggattttgatgggtgttgaaaacagcaaaaacaataatattatccccgataatttgataaatgataacataaggaaacttctgaatgtaagcctcacgcaagtttcctttttttaagggaaagtgaaatggataattttgaattcttaaaaaataggattcaactttttttataaatttttcaccaagcccggtttgctgactttcataccataatgcagcttccagtaaatcggcttcagcttttggagataaagaaaagtgataaatcataattttttcatcaatctttctttaacctcttcccagctcgatgtttttacttctcctttcatatatttttcacgttcttcttcaatccgatcataaatataatcaggaacttgtggataatctgaagattctaattcttgatctccctcttcagcatcaataattcctttgaaaatgcgtaaaattctttcatcggcaatatcgatgaaatcgtgaattctttttctgatgtctacggtggagtccatttttaaaactttaattttataaaattacaaaattattttcagcatttttccaaaacaattgctgcattacatcctccaaaaccggaagctgttttcagaatatatttaatttctgcggattggttttctctgataatattcaaaggttgggaggttccggtttcttcaaaatttttggatgagattaacgttttgtgcaatgcactttccatggaaatgatgctttccagcaatcccgatgcgcccaaacagtgcccgtaatatgcttttaaactatttagagggatattttgtaaattcattctgttgaaagcgatggcttccatttcgtcattataaatggttgccgtaccgtgtgcggagatgaagtctattttttctgctgaaagctgagcttctgtcattgcgttgttgatgcttgcaaataaaccgtctcctgttctcgaaggtccggaaatatggtttgcatcgttaatagcggagtctcccataattttaaaactaaaattttcgttttcatccggtgttgaagtaatatatactgccgctgccgcttcgccgatattgattccgtcacggtttttatcgtaaggtttacaaatctcggttccgattgcctgaaaagaattgaaccctgaaatcacaaattctgaaatttcgtctccggcaacaacaaaagcatctttatattttccagccagaatcatatttttggcaacacttattgccattactcccgaaacacaggcgttggaaacaacaatgggctttgtttgaaacccgaaaaaatcagttattttttgtgctaaattagaaagaaaaacgctttcgagtaatgtttcctgattttttaataagctgatgtttccttttgtggtagataaaataaaagcggtttcttctgaaatcgagtgtttttcaaccaaaggttttaaactcagcaaaagcattttttcaagtcttgtgaagctcacgttgtcattggctaaacgccgaatctccgatttctgagtggagtcgaagaatctattgaattcgttatctaatttctcagaatcaatcatcgaagcataaaaaggctcctgattttcgatgattttatgtaaacctacgccggattttccttcaacaagagcattccagtttgaagaaacgtcaaagcctaaaggcgtgacgcagttataatctgtaatataaacttctttcttcatcagagtcccattttatctttccatgcctgaaaaaactcaggattatacaagcataaattgttatcagaatccagaaaaacctgaatggtttcacctgaacagaccaatttatcttcttcgttaaaaagctcatatttatagatcaatttcgcagaatttgaattgatgaacgttgtgacaattctgaacgtttcgccatattttaaaggcagaaaatgctcgcaggtgctttttacaatgggcgttacaaatcccgctttttgaatatcaagataggtcaaaccgtgctgtcttccgaaagcttctcttccgtcttcaaaataaacgatataatgtccgtgccaaacaattcccaacggatctgtttcgttgaatcttacacgaacttcctctgtacagcttaatatattttgacttttagccatttttctatttgaaacattaagattttattttaagaagttaagcgatttaagcttattgttcttaaataaaatcaatctattgatttcttaattatagtttaaattcttaaatcttcttaatggttaaaattatttagaaataaacatagtttatttagtttaagaaaattaagattaaaatatcttttattatataattaatgtcagtatttacactgcattctgttttctttcgtaaaataatgaaatagcgaccattgctatataaaataaaaacaggaaaatgatttctttcgcaattcctccgattccgctgtttcttaaaataatatcgtaataggcattcaatccccagttcatcggcgagaatttagcgatggtctgcataaattcaggcattaaaaatacgggaacccagattcctccgattgcagccaaaaccaccacggaagtcgcgccaaacggagccgactgttcctgcgtattggcaaccgttcctaaaagtacaccaaatccgatggctgccaaacctgcaaaaatggtcacgacaataagcggaaacatttttccggtaacgtcaaattgcggaagatccatataagggaaaagataaattcccaccgcaaccatcagcaaaaactggatgacacagataatgagatacgtaaaggtttttcctaaaatatgaacgaaatatggagtcgggctgattctcgctcttacacttgttccctggcttttttcttttaccagattaatagacagaggaaccacaatgaagaatatcgcaaacagtgcccaagccggaacattatgctgaacggaattcggcatgatgtctgtttttccttttttcggagtgatttctttaaagctgattaaatttttagtttttccgagatcttccgtagttcccaactgatcctgaaaggctttgtagatctttttgttctcaatttcaaaaaccattttgttcacagcggtcatcacattgtttttgaacccgatattggttgccggatcaaagtacagatgaatatcatcagatttaacgggactttccttcacagatgtcgagtcattttcaagtccaaatgaactgactattgcctgaactttagattctacattggaattgatattcttcgttaaatttttcggaataacaatggccatctgataatctcctccgaaaacggctttttcggcagattcttcggtgaaattggtaagaagctcgaaggttttaccattttcgaactcttttttgatgttttgtgaaatttcagatttgtcgttatcaataaaaatgatcggaattttggtaccttccagatttttaaaggtagaatcctgaattaaagtaatggtgataatcagcagcaaaggcatcacaaaaatgatgacaattcctccgatatctcttttcagcaaaagaatttccttgatgaaactccgccacaatttatacaacaacatttcgtaattcttttccggttaatgatataaaaacgtcttctaaattttctgcattggaaaccttactgattaattcttcaggtgttcctacagcatggattttaccatgatcgatgatggcaattttggtacagaattcttccgcttccgaaaggtgatgggaagtgtagatgatgcacgttccttttttatttaaatccaaaagataatcgataatcgcttttttagactgaacatccacaccaacagtaggttcatccagaaataaaactttcgggttgtgaagggttcctgcaatcagattacagcggcgcttcattcctccggaaaactgttcaacttttttgtctgcaaatttcgacaaacccatgatttccagagattcagtgatcgaattctttaaatttttgtgactcaaaccgtaaaggcttccgaaaaacattaaattttctcttgccgttaaagtagggtacaaagcatattcctgcggaacaatcccgatgatttgtctcaatttaaaaccgttcttctgtggcgaaagtccgtcaattgtaaaatgtccggaagtcggttttatcaatccggaaagcatggaaatcaacgttgtctttccggcaccattaggtccgagaattccgtagatttcgtttttggcaatactcagcgaaatatcgtttacagaaaagtcttctgcatttttatattttttgtagagattttttatttctatgaaatgttccacgttatattgcttttctcagttttttataaaaagcttcttccagatcggcaatgtgaagcattgattttgataattggttataaatatcgcttttggagttcctgtttttgtacactcttgcaatatccaccgcaaaatctctccaaagatcaccaattgccgtgatttctttagaaagttctcttaattcatcatttttaagaataacggctgcttcctgtagaaatgcaccgtaaataaacctgaatccgccgccgccggtgccgatttcttcctgcattctgatcagttgtcccagataatgattggtggtttttgtaccttttttagctgcccatttcggaatgcttcttgcaacccatctcatggctttcaccccgataataggaaccggagccagcatatttttacaggtatctttgattccttttttgatggcttcttccagatttacatgatccggaatgtgggtagggtagtacatatgacctttcggcggaagtgctcctttggcgtatctcactttttccagttcggcttcagtaagggttgtggtgtaatccatcacgggatcgctgatcaggaattttccgtcttcttttccgtaaacaacgagattgtgagcattaaaatggaatttatattcttcaggaaaataagtaaggttaaaaacacccacctgtaaacctgtcggaatattattattgaggtttctttctaatgctttttgtgcttcggcaggattggaaaatttttctcttttgatcttaattccaagtctttttgcggctttgctgaaaatggctccaggcatcggacgatagctgaaacccggtgcgaaattaactttcaggaaaggtaaatacacgaaaaataatccggaaccgattccgaagatcataggctcgctgagcttcagtcctttattcaataataaattggaggcaacaccgttttcgcaatgggcagtctggtgatgttcaaaattaagttccattcgtttcttgtctttttatcgcgggaaatgcttgattttcatattgtagagattctctttccgtcagaatgaatgacagtcggagggatttttctcttttaatcaattgtctaccctttgaagttttttagttcatccaccgaaataccgaaagcatcggcatattttttcagtacggaatcgcttagtgttttaaatatttttggttttccgtgtcttttcacgcgccactgccacattccgacataggctgcaagaacctgcatatccattttattcagctccatgaaatagacaatcgggcttgctgtattgttagcaacattttgtcttgcttcttcaattctttcattaattaaagccaaagattcgtccaaagcagcttttttagcttcccagccggtgctgtttgcggtggtgtagttgttattttcatctgtaacgtacaaaacctcagtcatattcgctgattttaagttgctttcgtcttgtggaaggtcttgttttttcattacttaattttttacttcctgaataaatagagtaatttccgctcttatcagcagttcatcatcattgaatgtctcacaaaaaatctgacagatattttcaaactgtgaaaccaatgaggcttttgaaataattttgttgccgactttgggcaaagtaaatatttcaattttttttatgttggtaatgaagccaattacttttgtttctgtttcaggattttcaaaaaagctctgtcctaaaattgaggagcaggtttgtgctgcattttctatgagtccagcttcaacgaatacattatcgtgaacaaaaatattgtcttcttttatttcaaaggaagtaatcactttttctttcgtcaattccagaatataatctgtcatcagcatcggttcgcgatgcgggagaaagttgtggatattgatgatgttttcttccttaattttcattgaaatttctattttattttaccagacctcataggtttttaaaacctatgaggtctatctaagtataattacattacaaccgttttcatttgagattttgcaataacctcatcgttcagcttggttacaatatcgactaaagttacgcccatcatttcattgatgatggaaacttcggaagtcaaggtatcgcccaatttaggtaaagtatacgcttcaaaggttttaatggctccgatatatcctgtaggagcttcttttcctagcagataaaatttatagccggtgtgtaaagctacactctgcgcctgatgttctatcaaacctgaagcctgaaaaattccgttctgaacaaaaatattgtcttctttaatttcaaaacctgaaatcaggtgactttctgaatattctgaaatgctgttcaccataacgaaaggaaatctttgcggaattaagctttccacaaagtcctgatcggaggttggtagtctgttttccattagcaaaccgttagcaaagcacaggaataagcaaatcttccgctttcaggaacacaaagcaatactttttctccttttttcagctttccggaattcattaattcttctaaagcgatgaagatagaacctgctccgatgtttcctacttcagaaaggttgtaataccatttttcccaagggaaatccaatcctacattggcaaattcttctttaagcccttctttaaagtatcctgaagaaatatgcgccaaaacatggtcgacggtttccggatcgagttcatgcttatcaaaagatgatcttaagctttcagcaccttttaccagaatatatttatctaaaattttcgtgtcctgtttcaatgcaaaaatagactgtttcagccattcgtcggacggataatctgcccacgatttcaggcttccgtcttcctgcttttcgcatcctgcatacatacaggcttcgatctcgtgtgcgtaagaatagaaatcaatccattcctactttaagatttgttgcgttttctcttggtttattttcaagtaaaaaagcgcctgctccgtcggaaagcatccatcttaaaaattctcttttgaaagcgatgatgggtctttcttccagtaaagcgaggttttctgcttcatggttgaatttatccgccgtcatccatgcagacattctctcggaacctgcgcagactgctttatcctgaactccagcttttacagaaaggaatccgtagttcaaagcgttcattccggagttgcacaatccggttgcggtatttatttcgatagattttccgatgttcagttcaccgtgtaccatggatgcgtgagaaggctgaagctgatccggagaagtagttcccacagacaatagtttcatgtcttcttttttgaagttttcatcaaaaagtccttcaatggcttttgccgtaatctgggcattggtatgtgtaggatttccttctttatctaaagcataatatcttgtcgtaattttattatttcttaaaataagagctttcgctttagattttgcaccgtttatataaccaagatacgtttccatttcatcattagaaaccggctcattgggtaggtattttgatgcttttgttataaatacgtcgtacattctattttaaattaattccttgtaaatattctctttgtttctttcttttaaaccagaaaacaggtgttgttaataagtgtaaaaccaatacgataggtgaaatgatccatatcgcagccatcaaatataccttaaagaatttaataagcaatggtcgtttttcttttttcttcatgatgaggtttgaccagatggtgaaaattttgtttcccactttctctacccttaccagaaaagcgcggatttccacggctccgtttttcaccagatcaggctgtaaagtatccagatcattattgctgaaatgtttttcaataatttccccgtattttacagagccttttatttcttcatccgaaactccggcggcaggaagaattcccgatttttctttttttccggtagtcagccagcgaagaatcgtaagaacactggtgtaattgtcgtgtcggtctaccaaagcgatatttcctaccaatttggcgtttaagttctttaaatatactttcagtttttcctgagaatacatccacatatttcttgtcgccgaaacggtaacaaccggagtgtctttcaggatattttccgcaaaaccacttttcaggaaagaaatgatcgggatggagggtgttaaataccaaacctgataaccaaagataatcaaatcaaactttttgttaaccacttcttccggcggcggaagaatttcactcgggatctgcaggtaagattccgggaaagtattgaaaaatacatcattcggccacggaaaagggaagtcttttttcagcttaatattgtagtatgtaacattgtacttctcctttttggcttcaaaaggtcgggcaatgttttttacaatatcggtaagctgtccggtttgtgaataatatataacgagtatatctttttgcatgggttctccttaatcgtttacaaaaatatgcttttcatatttatttttcagaacgaaatacttttaaagcttctgaactgaatttcagtgtataattattattttccggtaacgtattttccacattcataaaaatgatggtttcaggaagattttccattcggtctgctttgaagtttttatccgaaaccagaagaacatctatctttttatcaatttctgtgctgttttttaggtatctaattttccttctttttaccaaataaatctgttcggcgatttgtcttttttcttcatctttcattaagctgaagattcttcggctcgcctgctgaagcgtgagtaaaacatctttctgcccgaaatcatctgcaatgtgcagaatattggcatctttaggaaggtgtttattcagttcaaaataaaccggtttgtttttgttaaaatcttcttttacttcctgtaccacttcattatctttatataaataactcaggaagagttttttcttaaaataattttcatcctccagctcacttcggaacttcgcaaactgttccctgaaaaaagcattgatcttttttgttctttcggaataatttttcccgaagcgttcgtcggttttatcaattctgtcgcccacttttacggtaattgaaccgtcatagataataaagtctcctttcggctgtacttcagaatttccgtgaatgtaaaccggaaccacatccagtccgaattcttctgcgatataaaaagctcctttgtgaaatcttttgatatcgttggtataagaccgttctgcttccggaaaaacaaccagagaataaccctgatctactttttctctcagcttttccattccgttttcaataccctgagaaacgggataaaatcctaatgctctcacaatctttccgaaaacaggagagttgtacacccagtcattcaccagataaatgattttatgtgttgtcatggctagagccaatgtatccagaaacgaagtgtgattggcaataatgactgcgggtctgctgaaatcttcattcgggtttttaatgagctttttctttacaaatggattcgtataaaggacagaagttaaaaacttcgctaaaattaatttaataaagttcagcgttttgcctttcgatcgctttacaaagatgcttccgatggcagaaaaaagcaatccgcctaatccgtaatacaggaaagacaatactgcattgaaaaataacctgaaagtaaccggagaaagtccttttttagccctgtttgtaatcagcaaacggaaccagaacggatataaggttgaggtgatgatgatcacggagaacatcccgattaaagcaaccaaagctaatgaatgcaaagcaggatgtttggcaaaaattaatgaaccgatggataaaattgtcgtgaaaaccgccagaataatggatgttctgtacgttggaagttcgttttttcctgtcgtatgctctttctgcatagcctgggtaaggaaaatgctgaaatcgtctccgaccccgaaaaccaaagtacagacaacggtgctgaaaatgttcagttccagacctaaaaagtaaagaattcccgctgtaacgactcccgttaaaacaatcgggaacatcgtgagaaccgttaattcaaaattacggaagaacacaatgatggttaaaataatcgctaaaagggaataattgattaaggtgttaaaatcatttttcagcaaacccagaaagttttcgttcatttgctgacggtcgattgccaaagcatcatgctttttttcaacgtctttaatgaaggcatctcttttcttttcgtctacttttacaacattggaaactgtgtaaaatccgttttcctgactcagaaattcagaaatctgaagggcttttactttttcgtagtcttttaaggttaacgtagaatagtttttatttaaattttcattgaactgatcaaaggcggaactgttaaatccgaattgatttccgtttttaattaattcagaaacggtttgattctttttattttcatcccagaattttttccagttttcaattctttgctgctggtcttttttagaaagaaccacattcccgagagaattgtagcttaaaatttttccttcttttttttctttttctaaaaaacggctcagctcagaatttctggttaaagcctgttcttcagaatcgccgtaagaaatcgtatagatggattttgatgtaatgtcggataacttctgaagttttgcttcgcttatttttaaatctttcggaatataattcagatcgccgatgtcttcgttaaaacctactttcctgaatccgaaaagacacgcaataataataatcgaacagataataattaaaggtttgtttttctcatacggatatgaaccgattttgtcgataaaatttgcattgactgctttttcttttttcttcggatgatacagttgcggaatgataattaaagccgtaacggaagataaaataaccgttatggctgcgaaaagtcccagatctttcaatgcttccgaacgtacaaaaacaaggcataaaaaagaaaccgccgttgttgcgctgcttaaaataataggctgcgtaatttctttgtatagctcttcaatattgttgttgtgtttgtaatgcgtcagaatatgaagagcgtaatcaatggtgattcctatcaaaatggctcccacgctcagagaaattgctgaaattttatctttaacgaagtataaaatcaaaagagcgagtaacaccgagaaaaccgtgggaagaaatacaataatcggcgtaaaaacattcctgaaataataaataagaatcagaagaagaaccgtcatggaaataataaccgtattctgaatgtcttttttgatctgttgtgcattcgcaaccgcaatgacaggcgaaccaaaatagctgatttctgtttttcctttaaattttgtgttgaggttttctttgatggtatttaactgattaacaaatgattcgttgtttttggtgtcgttgcttttgtttttgggatcaatgaaaagcagcaggttttttccgtctttggtaacgatgtaattatcttccagcttaaaatctttgctgatgtttaaagcattgagttttttgattcccagaaaagtaattcccagcggatcttttttaatgaattctttggtaacaagactcgttggcgaaaccagagaaacgtagttgttttcaacctgtttggcaatgctgtctttctggagttttctctcaatttccctgtaatcgttttcattcagaaataaagggagattctgattgacgaaatcgaaggtttctgaaatttcattatcgtttactttcccctgaagcgaaccgatgtattttttcagaggttcaatttgatttaaaaaagcatcggcggtctccgaaagctgaaaattttcttctttggatctgttttcgataatcacaatgatcttgtctgaaaaattgagctgtttcagaacttttgcggtaagatcggatttttcgtttttaggaataatctgattgatgtcttcctcaaaattgatcttcgatgcgaaaaacaaacataaaacggtaattccgaccgaaaaaaatacggacagaagtttgtttttagagatcagataatataaaaatatgaaaaaacgatgcattacattataaaaatcaggtttgcaaatttaaatttttcggggggagttcaaaattttttatcacaagttttatctgaaaatcaataaaatatttagtaaaaatgaaaaaaaaatatacttttgcaaaagttcccaactgatgaagcgtgttttaaaacaaaaattgactaagtctaaaacttaggttttgatatgtttaaactatttgatgaaaaaataaacggatttttatttattataatctttcctttccttctctttttcatgtcctattacggatttgagacttcttatgttgtaggaattaaatcctgggaaaaagcgccggattttatgttttcgtcggtctatgcttaccgtgtaattccgaattacctgagtgttcatgtaacggagggaataacctccttggtgaataattatcttccttttgcaaaaagttttcttttgaagcagggttcgctgttttatcacagtacatttttaattaatgttttcttttttctactgacttcatttgttctgtataaaattttagaactgaagcccgtagaaattctttccaacgaaaaagtaaggagaatggttcatcttattgcggtgttttttatcgtcattcttcagtatgttcccaccaattgcgattgtattgcattgtttttctatgttttaggaatgtttttaacactaaaatatttacagcataaaaaacctgcggatttattgggattaagcattgtgatatttatttcaacttttgtgcgggaaaccgcctgtctcaatatcgctttttttgcagcggtttttattgatcctgaaaacctgaagaacaggaatttcactttcataaaagaaacttctttgctggtgattgcgtttattcttccttatattgctttaaggctggtaattccgcagaaagcttcttttgtggaaggaatttatttaattaagaattttacaagtccttataatcttgcaggacttttgtttggaattttagggatttatttcagttatggtttttctgatgataccggaaaaataatgatgaaaaaatatttgttttttgcgctgccgtatcttttaatgattactttagtggggcttttctgggagaccagattgtttatgcctttgctgattacgggaatcgtaacggcttcttatcagtttaaaaatagtttaccggaaagatgagtttactgcatccatattatattattgccattatctatatgctgattttcagttatcaggaagtttttcatggtaaagttgaaaaaaaatggctttggttcttggggatctatctcatgattattgcaggacttcgcgatcaggtcggtccggattatgggagttaccgtggaatttacgtgtattccgacaccaaagattatatctcgctcattatgaaaggtttcggaatgaaggggcctcaaccaatcgaagtggaatggctgtatgtactcattaataaaattttactgaatgtttttaatgcaccgttttatatcctcacctttgtaatagctattcttgcgatttattttaaggtagaatatacggatgataatacattttatccctttacctttatgctttttatgttcattcccggattttttatcggggaaagcggacagatccggcagaatctcgcttcgtttatcgcctatttcggaataaaatatattaaagaaaggaaacttcttgcttatcttctctgtatttatcttgcagcaggagttcataccgtttgttatgtatttgtcccgatgtactggttggtaagaataccgctgaacagatttgtaatgctttttatgattattacttctgtcttcctgtcaccatttgaagtctatcgtgtttttggagattttatgacggatattgctgcagacagtacactttctattggttttaacggatatatggatgaaacggtgcaaagattgaacggagccatcggaattcctgaagtaatgatggcaatcctcaccttcttcctttttgcttttgatgaaaaaatgaaagaaaaatttccttactacgaataccatcgtgcgtatgttgtaatcggggtttgtttttatttcattttcagggataatcctattttctcttcgcgccttgcgggagcttttattggttttgcctatattattattccgaatgcaatgtatgtggtttcttcgaactcgaaaaagatgatctattcttttatcattgctcttactgttttcaactttgttgtattctcaagctttaaaaatattgtgaacggaagatttacttgggatttatatgagaatcatctattgccttaaaagagcttacaacaaccatcaataaatgaagacaatactgaagagtgttgtcttttttatttcaatatctctcaaattatcagggtgttaaaattaattcgatgcataatttattgtaaaaagattagagaaaataatgtattttcgcagaacctgagtttgaaaatgatatattgacatgtataatgattaattgtggagtattgttttattaattccttttattgtgaagttatttataaaataaatcgattttctttaacaagggtttaaatgttgtattgtattaacaacagcataaaatcaaggacatgaaaaaatcgtttaccaatttcgcagcacttttaagttgcctgtttgcgcatgaaatatacgccaaagaaaattttaagataaataagtctgatgattgggcaacatcagaaaaaatacattccggacactcagattcattggtggaatctttgcacaaagaccgttttccccatgctcataacggaaagttattagctccggactggacgaaagctcccaacagttatatttttgatcccagccaaaacagcaacggtatttacattcccgttagaaaagcatatgcgatgtgggcgcaggataaattgctgggaggcacaggaattcctgcgggtaaagttacggcagatgttctttgggaagatgttcacggcttaataaagtccgacgctggttatcggcttgaagtaacagatttcggcgaaaatgccaaaattaaagtgcctgtaaacaaatctaaaaagggaaatgcggtcattgctttcagggtagacggagaagtctactggtcgtggcacgtttgggtcacagatgatccttccaacggctccacttataaaagttaccccaatgtgaaaagacaaaaagcagacggaaccattgaagctattcccgatgaagaatggggctggatggatagaaatctcggtgcagtaagcagttctataacggcaaacgactggaacagaaacggaggactgctttatcagtggggaagaaaagatcccattccgccattggtttacagggggaatgatttctatgaagtttcaggatcaataggaaggataagacatcgcggcgcaaaaaacttcaccggagcagctaattttgataatctaagaaaatttgtcctgctttctaacgctacggtttccaataacctgaagctttcggtaaaaaatcctttaagtttaatctatgtaaataaagacgacaattctggcattgcttattataacaacaatgcaaatctgatggtaaactggtttgggaaaatgccgggcttgaatgacagtcagcttccggagcttaatctctggtcagataactctcagggaaaagttacttcaggatataatgctgatgccgcagcgcagccttaccgtaacaaatcttcctatgatccctgtccgaacggatggcgcgttccatccgcattagttgccaatctggcttctcctacttatgttgatgatattcgggtagatttttctccgtttggcgtaagaacaaatatgtctaaaaatgtttttgaagccaataattatcataaaataaaacctacggatatcggaacgccaagttttatgaccaattttaagctgtatccaaatttcggttttgatctttcgaatgcaggaggtttcaatatgggaatttttccgggaacgggagccattgttctcaatgcgcaccaaggacagtttacagatcagcatcagactaccttatggacggcaaccatggcaaggcattttgatacaacgccgtctgtaggagcaagaacattatttttaattcctgataaaatgcagccggatattccggattccggttatcctgatgtaaaaggaagatactggtattttccgcttgccggcaattctacaacagatgcagcgggttgcagatgcataaaagatcctttatatgttgttaacgaatatgatttccctacggaatatattgtctctgaaaccgaataccgtgaaggtctgaataatccgaatacctatcaggttgtaaaaaatacatcagctttcaccgtggaaattcctgtaagtaaagcgttttctgtacaaagtcagcttctgaacaataaaaagattttaaactcgattaattttaataaccttaaagccaatattctctggaccaccaacacaggtttggtgaacagcctctccgttgttaatccttcacctgcttctctgggagcaatttcttcctccaaaattgcagttaccattaatcctaaccaaagcggaaatgcggtcgttactttacataacggaagcatcacaaatcctgtgtattggtcttggcatgtctgggtaacagacacggcggtaggttcttataattatacaaccgaactgcctgtaacttcagtgacgaactacgtaaattatgttccgaaagcagataacgtatttcagacggaattcatggacagaaatcttggcgcgaccgatgcctttcctgttgtagcgaatccgttaacgccaactgcagcagaactggcaaaaattaaagcttccacaggactgcattatcagtggggaagaaaagatccgttgccgatcttccagtatgcagacgacagaacgtctcatcctgtttatcttggaaataccgcaaacggagttttaacctacacaacactttcagcggcttcctacaacgatctcgccggaaattatattgtaccttacaacacctacaccaattcggcaaacgccaatgtttcggcggcggataaaatttcagataaagtttccaaaatattgtcatactctgtgaaaaatccattggtttatatgattccgagcgcgtttgcgccatataattcatcaaatcctttgtataccaacggaaccgactggcttgccaatgagccgaatcttgcacctgaacgatggggaagaggaggcaaaaaatctccgtttgatccttgtccggaaggatggagaattcctgatcttaccggagtcatgatatcaacggggcaggatttcggattcactccatggtataaaaaagataaaaatgcagccacttcatacagcatcattacagattatctgggacagagagtccgaagaagtgcttccgcgagttataccatcggatatatgtttaacgattcgtcttacaaaacaggaaactatccgaattccggatcgcgtggtttcagaagtgtaacagcaaatcagaccgcaaccggaacgtataatttcatcaattatcagtatcccggagtctggactgccgctctgaattcaaattacatcggaagaccggttaatattttatttgatgccgcttctaccgccaaccgaatgattgcttttcatgataacaacgatccgtatttcgggatgagctgccgttgtgtaaaaattaaatatgatgccgaaggaaatgaagaaggggtaattcctaagcttcagatcacttctttgcctgctttaatgccttctgtggttcttagtaaaaatgatgttcaggcaatcaaagaagataaaatttcattctttccgaatcctgtaaaagaggaactgtacatcaaaacaccggatagcagaaacggatattattatcagatttacaatatgtccggacaactggtaaaatccggaaaatttgaaaacgggaaaactaatctctcgtcattgattaccggaacctatttactaagaatcaacgattcaaaagaaattgtaaaaatcattaaggaataattgatataaaatagcaaccttaagagaaataaaaccgtaattaagttaaaatcattatttttgagtcttaaataatgaaaacaaactgaaagctgttttgtttctctttttttgttccaaatttttcaaaacacattatgaggctagaaaaagtcgtatcgaatttcaatattaaaattggtatctattttttaattgccgttacggctgtttatacgcttgtattcacctactattacaatcttaaggacgacggatatattcttggagactggctcatcaattatcaggatggaggttttaaaagaagaggattgtccggaagctttttctttcttttgcaggatcttacaggattgcggttaaattatctggtctatttcgtacaatttttaattatttccggatttttctggctgtataccaaactcatccggtataaagccaccgatttgctttatttttcacttttactgtcttccattggttttgtgggacttttaaatacggtaacctatgtcggaaaaaaagaatttatcgttttccttttatttacatggtttgcctatttgctagacaacgacaaactatcgaagaacaaagaatattttttctgtattgcacttttcgtaacgacctttctacacgaagttgttttgttttatgtcccttactttgcgattgctttatatctgaaagcaggaaagtttgaatttaaaagatatctcaaatattttctctccgttggaattcctacgcttttaatcctggcttttggtaaaaatgtaaacgaaggaagatctcttcagattctttgtgaaagaggagttcatcctacctacggaattttttactggaacatcaatgaaagggattacatcagacagcacagcagcgaatatgttctctattttttaagtttagcaataagtatttttcatatcgggtattatttaaaatttctaaacaaccgaaagattttatctatattgttaatcggagtttttttgttttcatttcctctgttttatctcgccatcgattggggaagatggatgtatattcatatgatgttgatgatcgtccttttcgctttgctgttaaggaaggagcatagtattgatgctttcgaaccgattgttattaaccgtaaattttacatcacccttttcatcattattttttcattattatatagagtagagatgtccggaaagggctttactttcgaaggaattatctacagagtcttcgttgcgccgcttgaattattaaataaaatgtaattcaaaaaaactatctaataaaaaaactttacttttgcaaaaatttctggaatgtcgaaaaatttagtaatcgttgagtcaccggcaaaagcaaaaactattcaaaagtatttaggtaaggatttcgaggtaaaatcaagcttcggacacatccgggatttgcctaaaaaaggaatggggattgatctgtcgaccttcagtccggattacgaagtttctcccgacaaaaagaaattggtaaccgaactgaaagctgccgtaaaaaaagccgaaatggtttggctggcttccgatgaagaccgtgaaggagaagctatcgcatggcatttggcagaagaactgaaactgaagcccgaaaacagaaaaagaattgttttccatgagattaccaaaaatgccattctgaaatctattgaaaatcccagagatattgatcagaatctcgtaaacgctcaacaggcaagaagagttctcgacaggatcgtaggttttgaaatgtctcctgtactttggaaaaaagtaaaaccgggattatctgcgggaagagtacagtccgttgccgtaagattaattgtggaaagagaaaaagaaatccgtgaatttgtaccgaaagcaagtttcaaattagacggaattttcttaaataaaacaaagcaggaaatttctgcgaaacttaaaaaggatttcgataaagaagaagaggcggaaaaattcttagaacaggcaaaaactaccgagtttaaagttttaaatgttgaaacaaaacccggaacacgttcagcttcggcaccttttaccacttctacattacagcaggaagcttcttcgagattaggatataatgtaaccaacaccatgcgtcttgcacagagactatacgaagaaggatacattacctatatgagaaccgactcggtaaacctttctcaggaagcgattgaaggcgcaaaaaaacaaattgtctcagaatacggagcggaatattctgcaccgagaaactataccacaaagtccgcttctgcacaggaagctcacgaagcgatccgtcctacagatttcgctgtgaaaacagtgggagatgcccagttgaacagattataccaattaatctacagaagaacacttgcttctcagatggcgaatgctaaaattgagaaaacggtgattgaaatcgggaacacaaaacttccgcagcatttcgaagcacagggtgaagtcattattttcgacggtttcctgaaagcttacggaattgtaaaagccgaagaggatgacgaagaaaacaacgaaaaattgcttcctaaagtaaccgtaggagaagttttagactataaaaaaataacggcaaccgaaaaattcacaagaccgagcgcaagatataccgaagccggtctggtaaaaaaactggaagaattgggaatcggtcgtccatcgacgtatgcaccgaccattcagacgatccagaaccgtgaatatgtggataaaagagaaatagaaccgcagacaagagaagtggtaaaaatttctttggcaaatgataccattaaaaaagaagtccttgacgaaaaattcggaggggataaaaataaattcgttccaacggacacgggtgaagtggtaagtgatttcttaaccgataattttaaagaaatcttagattatggctttacggcaagagtagaagagagcttcgatgaaattgcaaacggtgaccagaaatggaaagagatgatgacaaatttctactcgaaattccacccgagaattgaagatgtagaagagaatgcagaccgagcaaccggagaccgacttctgggagtggatccgaaaaccggaaaaaatgttcatgcaagaatcggaagattcggagcaatgatccagatcggggaaacagacgatgaagaaaaaccgattttcgcctcgttaatggcaggacagaatatcgcaaccattacttttgaagaagcactggaactgttcaagcttccatttgatttaaatgaagtggacggacagcccgtttctgtgggagtcggaagattcggaccttatgtgaagtggggcgagacgttcatcagcattccgaaaggagaagatccgctttctgtagatcagaaacgtgcagaagagatcatcaacgaaaagaaaatcgcagacgctccgattgccacttacaaaggggaaccggtaacgaaaggaagcggaagattcggacctttcatcaagtacaaagatatttttgtgaacgttccgaagcgatacgattttgaaaacctttctcaaagcgacatcaatgaattaattgatgccaaactcgaaaaagaagccaaccgatacatccagcaatgggaaaaagaaaagatctccattgaaaacggaagatggggacctttcattaaatttggaaaagcgatgttcaagatcccgagaaaggcagatgataccaaatacgaaggagaagagctaaaagaaatttctcttgatgaggttaaaaaatggattaccgatcaggatcctaaagcttttgcagagaaaaagaaacctgcggcaaagaaagctacaaccgctaagaaaacaaccactaccaaaaaggcaactacaacaaagaagcctgccgcaaaaaagtagatggattgtaaaaatagaaaagcacagatttgggtctgtgctttttgtttgaagtcgcattattgattattatctcctttcataaaagtaaaggatgtggatcttttagaaagagcacacacttttatagactttggttaacagtctccgaagaggcttttattactgttttgtgaaaattagattatccgtttcaggcaaataaactgttttgtctgcattagcaggacaatcatctcccacggaagtactgttaggattgtaatcccaggatatttgggttgcacttattttctttaagaaaacatctccccaacctataccacaattagttccactgtagtagaaaataattttattttcatacggtcgtgttgcaatactatataattcaatatttggcacattagaattttgagtatcctgcaagattacacctgaattatttctcactatatactttattactaagacatctaaataatatgtttttcctgtacttttctctaatttattttcttgttttgtaatatgtaatgttatctcatttccttcaaaattagatttataaattcctatatatgggtctaattcatgatttaaatcttttagataagctccttgtgggacattttcgaaaaaagtatttaatggatattgttgccctttacaagaaacaattaaaaatgacataagtaggattgataatagttttttcataatatgtttggttaaaaagcctccgaaaaggcttttattactgttttgtgaaaattagattatccgtttcaggcaaataaactgttttatcagcagtagaaggacaatcatctctcaaagaggtactgttaggattgtaatcccaggatatttgggtagaattaagtttttttaaagttactttgccccatccaactccgcaattagtacctccataatgaaatattactaaattattacttggctgagttcctatactgaaaattgtaaattttatctgatcaggttggaaattcatgttttttgtatcctgtaatactgtccctgatgaatttttaacaatatattttattgataatacatcttgatagtatttttttgaatataaatcaaagaatttgtatatatcctttgttatatatagtgttatttcattaccttcaaaattagctttatatattcctatataagggtttaattcattatttaaatcttttagatatgcattgttaggtacctcctcataatttgtatttaaaggatatgtctgctgtgctttacaagaaagcacaaccaacacaccaaaaaataaaatcaaacctttcattactgcttagtaaagattaaatcctttgttacaggaagataaaccgttttatcagtacttggaggacatgttgcactgtcaattaatgatccattgggttcatattcccaagaaagctgtgtggcatttaacttttttaatgtaactttcccccaaccaattccacagtttgtaccaccataatataatgtcacaatactctgagttggacgagtactcatactatataccgtaaattttaattgattctgctgaaaagacatatttgcagtattttgaagaatatttcccgaagaatctttaacaatatatcttattgataaaacatctttgtaaaagtcttttgaagaagagtgaattaacttttgagtttctttagttataaataaagtaatttcattatttccaaaattagatttatatactcctagatatagagataattcattatttaaatctttaagataagccccatttggaatatcttccattaaagtatttaaaggaagtgtttgcgctttgcaagaaagcacaaacaaaattcccaaaagccaaactgcttttttcattactgcttggtaaagattagatcctttattacaggaagataaaccgttttatcagtacttggaggacatgttgcactgtcaattaatgatccattgggttcatattcccaagaaagctgtgtggcatttagcttttttaggtaaatatctccccaaccaattccacaatttgtacctttatagtagaatataataatattctgatttggttttgttcttgtgctatatattatatgatatttttgatttggattatacatcatattttgagtatcctgtaaaattattcctgaagaatttttaataatatatttcacaattaatgcatccttatagtaacttttattcattctttctgttggtttattttcttctttagtaatgaatagagttattgtattgccttgataatttgcttgataaatacccatataaggggttagctcattatttaaatctttaagataagccccgtttggaatatcttccattaaagtatttaaaggaagtgtttgcgctttgcaattaagtacaaacaaaattcccaaaagcccaactgcttttttcattactgcttgataaaaattaaatcattagttacgggaagataaactgttttatcagtactcggtgggcaggttgcgctatctattaatgagctgttaggattataagtccatgaaatttgtgttgaattaattttttttaatataatttcgccccatcctattccacaatttgttcctccataatatagtgatacggtattttgactaacattattcactatactataaatagtaaacttaatttgatatggctgaaagctcatattttgtgtgtcttgaagagtaattccagaagaatttttaactatatatcgtacggataaaacatctttatagagattttttgaagaaaaacgaaaaggcttttgaatttctttagttatatacaatgtaattgtattgttctgataaattgaagtgtaattacctataaaagaagcaagttcattattagagtccttcaaataagaattattgggaacttcgtctaaatccgtatttagtggataaacttgttgagatttacaagatattgaaataatcaaaagaattagtaatattaaatttttcatatttttcagtttattgtgagcaaggtaaaacatttgttgtaccatcattatttttagttattgttttaattatatttccatcttccactctttgtaagttgattttattttctaaccccatatcttttatggtcttaaaaaatagtttttctaatttttcattagtaatatttccattagacgacttgtacattgatgatctggttccaaaatcactttttaattgatctaaattccaattgttactatacaaatattgctgcagctcctgtatatttccggtatattgtattacataatggtattctgttccgtccgctcccgttcctatcattcccataaaggcatcagcaatatttccgttaggctgtgccatggcaaaattaaggagttttacaatatcatccggcgacagcatttttatgcccattaaaggatggttgtggtaacctccctgatatcctgcttccggacctaattctacttcatgcttacctcccgagatcatcccggaagaagttccgtctgccttaaatttatagcctatttctccgtaattctgtgcagatacaggcaacgcagcctggtttttcattttggtaatggcagattgcagctccggattattaagtaaagtttttgttttttcacaaggatcatcaagatcaggaaattccgtatttccgccgcttcctaaacatccgggagccagtctgtaaaatacagtgttcaaagagcatggatcttttggtggctgtggcccgggagttcctcctccgccaccgccaccgccgccgccagtcgatcctgtagtgcccggaaaaccttcgtccggaatatagatcataatggtgctgcaggatgtggaatagcacgctgcacagtgatcacaatttttccagctttcatgatttttacaagaccagtagcttccacagctttctataaaaagcatcttagacgtacttccttgcgcctgatgtcctgctgcaagatcttttaaccagatccgcccatagttggtatcatatttttttcctgaaaacaaatctttaggaattcctgtaaactgctctgtaccaaatgttttattatccatatacataaatgtataaaataatctttcgcggagttcgtggtctacattctcattatacacaatatcttccagaagcttgttatcataatcttttactcctgttacgctattttcttggtctaaagttgcaaaaagtacagaactcatcgtctcattatcgtgtgacagcggtatcatgagtcctgttgcgctatcggtatctattatttgcatattatcccagaccggcattccctgctgatccggcatggtagaaaggaagtttttttcgcggttataggcttccagaattgccacataatctattcccgatttcgcattgatacctccgcttttggaatgcttaaaaaaatctctgttgtttctttgtggatttttctctgcctgtacgaaatcttcatttctgcaagaccacaagattacgagaagagctgtaagaaaagacagccggagaataatttttctcttcatagtcattttgttttttagtgggttaaatataattctttttctatatagatgcatttttttgttttggttgcaccagatgtattaaaaaaaaatcgatctatatatgaacaggaacaaaactattatttattttgagcggacatcataagaatttttatatttttgataaaaattcttttagatatgagtataggaacgaaagtaagacagtacagggaagcgaaaaactggtcgcaggaagaccttgccatgcgccttgataccacgcagaccacgatctcgaatattgagtctgacaaaaatattcccaactctttactgctgaataaaattgctcaggaactggaagttaatattaatgatctccttaatgatgcatctacaattattaccgataatgaatttaatgatcattcagtagcaaatgtaaatcagtataatcctacatttaatattcagtctcctgaaatgctggaagcgatcctgaaaaatcaggagcagatagccaaccttatcgattcgcaaaataaattgatagaaaaactgttaaaagaaaaatagggagaagcattctcgggcagagaatactaaaagccaaacaagttcttagtttctcgggatgagaaaattcagcctgaaagagagacactccgtctcgctccgagaaagtgtaaacccaaacggtttggcttcgtctcgggcagagaaagtataaacccaaaaataaagacacaaattatacagcagataaagaaaaattaattcaaaaaaaaaaatacacaatggaaaaattaaaacttacttcggtacacatcccgtcgttacaccatgcagaatttgggcagttcatcgttcgtttctttgaagattttgcccagacgtccttagacgccggtacagacggagactttaaaactttgtttgataaaattcagaatcagcttcctgcctacaacagcgcactggaccagatacgcgccagtgaagaaaccgagaaaattgccggtgcagataaagtaagagacaaagatgtacaggctcttaaagattctttaaagccttacaggaatgcaaaaacagatgccgaaaaagatgcttatacttccctgaagcttttactggatcagtacaaaggagtagaagatgcctcttatgaagaagaaaccaataagctgaatctgcaggttgcaaaacttcagtctcccgagtatagctcccatgtagccacattggggattgtaaaatttgtaaatcatgtcgcagattccaacaccgcttttaatgatctgttttctcaccgttcttatcagacatcacaaaagcaggtgtatgatgtaaaggcacttcgaaaaaccttaacagatgactacagacaaatgacagactatatctctgtaatggcaaacttaaaagctgatcctttctacaaggatgttctggcggttgttaataatcctagaaaatatttctccgatgtacttgccaaaagaaaagggaagccgtctccatcccctgaaaaataaatatttaaaaaatagagaaagcacagatttgggtctgtgcttttttcagaattaaaaattacttttagtcttctaccggatatttaaaatgatctattttaaagatttcggagggcaaaagttcactttccagaagtccccatcgatctcggttcccgaatccgaaaaaccataattcagtctcaattattttatctttttcatcaaaattttctttaatcgtactgtttctttttgatttccaaaagaagttataagtgccaagaatctccgtttctaactgaatttttgcagtatcaaaatgcagttgttttaagatgctttcgtaaacgttccgaaaagatatgatttagataatctttctcaaagcgacgtcaataaatttatagaagctaaattgaaaaaaagccaacctatatatcagcagtgggagaaagaaaaaaatctctctttgaaaatggaaaagggggctttcatcaaatttggaaaagcaaagtttaaaattccaaagaaaaaagatgataccaagtatgaatgtgacgaattaaaataaatttctcttgataaggtcaaaaatgggttaccgaacaggatactaaagcttttgccgagaaatagaaacctacagccaaaacagccaaaacagcaataaccgcaaaaaaagctccggctaaaaaaacgactgctaagaaataatagcttaatttaaatttaaactccttttgatgttttcagaatgggtttgtttttgtgaattatatcgtctaaattctaaatttacacattgtttttattgctaattgaatagccaaaattagcggttattttaaaacgaatttatttaaataattttctattgattgaatagtaaattaaaactaataaagaaacagagcaaataaaagctagtaataaatttaatctagataaccatttgtaatttgttgcattaccgtcaatctccttaaagtcatataaatcacgctcttttagatttttaattttcttttctaaaagaaaattgcttgcttgaaattttgaatggtgtttaatatatgcaagataaatatcgttcttattttggctattatttttaattgcaattaatatatctttttctgaattaagtaattcaagtaatgtgttcgaataataccatttattttttaagagttgagataagctttcaacttttccaatttgttttgatattgatattaaattgttatttatcgaatccattattgcctgcggaaatttattattttgaagataatcagagtgtaaattatttattagtttatttcttgaattatttttattcaatgttttgttttgatatgatacaatatcagattggatgtctaattcaaaatttccatcagacaagtcatggattgatttaatatataattctttagttttttcactgaattcataccaattagaaatggaagtaattaatgtagtgaaaaaaaaaggtataagaatgaaaacaacttctttactaagggtcaatcttctcatagttaattaattttgttgtttaaaaaaatctttataacgcatatttgtgatcattattttctattatcacagattttaaatcaatattatttaatttgtatcaaatttaaagaaacaaacccgaaactgcaggacattataaaaatcagtttttactaaattaactcataatcaaataatatgagccaatcaaaatatacacatagagatttttacaaacttcagctttgtaaatagtaatagtgttttaggcatctcattcacctatttacttgattttttcacgaacattgttttaaggaagcaattttcaaacttctattacttttatatttgagattttgaaattatgaatttaattaatgtctttgaggtggtaaggaatatctttcatcctaaaatataatttctaaagtctgcttactcattttattttaatatttttggactttaataagtatttgattacatgaattttgaagattttattatatccccaagaaatttcaggacagaaaactggcagatcggggcaggaatcacaaaggaaataaaggaagacagtattgtgcttcttttcgtttcggattacagaggcgcgaacggtgatgcggaagttcaggatttttcaggaatcaggaacgagttttacaaactgtcgcaactggattttgaaattccgattgtggatcttggagatcttgtttcaggaaaatctgttcaggattctcactatattctgcaggaagtattgtcggcttgtcattataaaagagctattccggtaattgtgggcggttccaatgattttgccttttcgcttttttcggcgcttaacttccataccaaaagcatcaattatacccaggtcagcaatattatttcgcttaaacagggcgaaatgattaatgaacatacctttttaagcaagattttcggagcgaaaactttttccataaaaaattatcatcatttaggctatcagaaacatctgaatgaagcagattcggtaagattaatcaaagaagttgagtttgatatcatccgacttgccgaaatgatgaattctaccgaaaaaacagaacccttcttcagaaaagcggatctggtgacggtaaactgtgatgccattgaaagtttcggcgaacctttttccataaatccgcaggtaaacggactgaaccgaagagaagtctgcgcatatatgaaggaaatcggcctaagtgaaaatttaaaatctgtcgggattttcaattataatatttactccgaaaaccagcttaatcatcagcttttagcacaaatgatctggtatctgatcgaaggaatcaatattcagcggtcacacccaaaagaaagacattatgaagtgttctatgttttggtagacgaccggcaatatgccttcaaacgcgataccttcagtaatctttggtatttcggggaggatgaaaatatagaaaactgcattccctgctcccgaaaagattttgatgatgccaaaaaaggctggctgaatgcacgactgacgaaaatataatgtatgaaaattgttccctcaaaaatttctgttattgttcccgtctacaacgttgaaaattatctggcaaaatgtctggattcattagttaatcaaacccaccagaacatcgaaattctggtcatcaacgacggcagcaaagacgattcggaaaagattattcaggagtatgctcagaaatatcccgaaaaaatcaggccatttacaaaagaaaacggcggtttgagtgatgcccggaattttggcatcgatcatgcaacgggagattatcttggatttgtagacagtgacgattatgttgcgccttccatgtttgaagaaatggtacatcttgctgaaaaacaccagtcgaagatggtaatttgcaatatccaaaaagtagatcaaaacggaaatattacgcaaaagctcactcagattcccaatatgcccgaaaaaattgatctcgaaaagaacctttctgttttttccgatctaagctattttgcatgcaataaattgtttaaaaaagaactttttcgggaaaagagatttaaaaagggagttcatttcgaagatattcagcttattccgcagcttttgctggagtgtgacacgatttcacagacccagaatttccattatcagtatctggaacgtaccgattctattaccaaaacgcacacagaaaaaggacttgatattctgaaagccgtaatggatgtagaaaaagtttacgccgtttcgaaataccgcgacaggaaagaggaacttaaaaattttcagatttttgaaggggtctattcttttctggcttatcttgcttatgtaaaagatgagaaggttttttatgacatgtcggaaaaattagagatatttataaaagatagaaggctgaaattgaaagatatattgaattataatcgttttgataagaattatctgctatctttgccactgaaaaaaaagatattttatctgctgttttttgcaggacagaaaaagctgataagaaaattagtgtaaacacaaatgtaagtactgtgttgcgttgctcatgagccgacagaaggtttttaagtcgctgaaccttctaagtacttgaatagaagaaaaatgaagaattttgaattgttcttaaaccagtcggggattcctattttttatgtaaaagtaggctttggttttttgttctcttttttaattacctatttctccgttcctacgattatcaagatttcccgaaggaaaaatttaatggacgaaccgggaataagaagttcccaccttcggaaaattcctaatcttggaggaattgccattttctactctatcggaatctgttcgtctatttttgcgtacgaactctttgatctgtataaattcctgtttgcctcgcttgtaatccttctttatattggggtgatggatgatattgtggtgatgagggcttataaaaagctggtcgcacagattgtggtttcagcgtttatagtaatcggatcagacataaggatcagaagtcttttcgggattttcgggatctacgagatgagctattttataagcgttatgtttagtattgttactttcatcatcctcatcaacgcatttaatctcatcgacggaattgatggtcttgctggaggatattctgtaatctgcagtacccttttcggaatcagctattacagattgggagaatataattatcctctggttgttttatctgccattatcatcggcgccgttctggcatttctgtattataatttatcgaattacagaaccaataaaatatttatgggcgatacgggttctatgcttttaggatttcttcttgcctttacttctatttgttttattgatattttcatcgacaaaaaacttcccggagttccgagatatcatcttcagtctgctccggtagtagcggtagcgatattaattctgcccattgtggacaccctgaatgttatcattgtaagattaattaataaaaaatcgccatttgatgcagataaaaaccatatccatcataaattgctgaggcttaatcttacacacagaagatcaagtttttatatcgttgtgtattaccttttcattgtaacagtagcttattatttcagacatataaatgtaaatcttctattactgattatacttttcctgggttttttaggagcttatattccagattttatttatcttttgaagaataataaaaagactatcaattaaatctttacttttgcaaacaacttgaaaaatatgatgaagaattgtaagcatttattacttttagccctgccgcttttaatcaccacctcttgtatcactacaaaagatgtacgatatatgcagcccagtgaaagccttgttattaacgaagaaggtttgatcccttataacattccggtttacagaattacgaagaacgatattttgaaccttaatattgtgacaactcctaaaggagacgctgcacagttttattcttccatgaatacttccggatctgccacagcaccttctacaaatacgattgctacgggaggaggaatgatgtcttccggtggaggaaatacaggtggaaatgtggttttctattttaatggccttaaagtagatgccaacggagatattaacgttttcggtataggatttataaaagcagaaggaagaaccattgcggaaatcagcagtgaaattcaggataaggttaatgaaaattttcaggagggtaaatctgaagtacgtttaaacaccaacggaattacgttttatgttttaggagatgtagaaacaacgggggttaccggagaaaaagtagttcataaaaatacacttaccattacggaagctttagcaatcagtggtggattaaacagaacggttgatcgtaaaaatatcgtaattcacagaaaattaccggaaggaattaaaaaagcgatcatcgatcttacccgtgaagacgttatgaattctccatattactacgtacaaaacggagatgaaatctatctgaatacaagagcgaaaagtctgaacggattgggcaaagatcctatccagaccttaacaacaggagtttcagtgattaccactgcattgtcgatctatctacttctaaaaaacctttaatattatgattccaggaaaagaaacaaaggtagaaaaagcagattcgcagaaagataaacacggaagtttcgctttatttgatattgaacactttttacgcagagtgctgagaaactggtactggtttgtattaatgttttttattggctacggaattgcatggatgtacagtaaatattatgcccagaatatttatgcctccaatttatctttaagtatttccaataatacttcaagctactttacaccaagccagtctattaacttcatctggggacagggaggaaatcaggacggagtttaccttaaaaaaatgcttttatccagaacccacaatgaatttctgattaaagagcttgatctttttgtaaattattctacaaaaggagtcatcaaatcaacctatctggataaggacgattctcctgtatttttacagatcgacagaaagcacgggcaacaggtaaattatccaatcacattggttcctaaaggcggagattcttatgaagtggtattgccggaagaagggcaatcgcccaacctgtatagctttgaatctgaaagttatacaaccattaatccgtttgaaagacctgccaataaaattattcgtgtaggagattggtatacctcacctaatctgagattcaggctgttaaaaaatcctgtaaaaccgaaaattaaattaaccaatattattgtcaacttaaatactgttaaccagaccgttaatgatattgtttctactattagtgtggaatttgataaggagattaatacgattatgataatcagcaagaccggttataatcttaacagtacagtgaacttccttaatatgtctgtaaaacagcttcagaaaaaaagacaggcagataaagttttggtagatcagaataccaatgtttatttaaaggaaaatctggataatatcagaaaaaaattagactcgagtgctaatgttctgaattacatgaaaacaactgaaaagttgtacgatattaaagacagggatgaaaagtctttaacagaaataaaagatcttgaagcaaagaaggcagatattgaaagtaaaataagctctctgaatcagattaaaaacagcttggaaagccagaatttcgaaaaaatgatcagtaccaatgcggctggttttcaggacggacttttcagcgcttctgttgcagagctgaaagctttatatcttaaaagaagagaaatggctttaatctacaagcccaattctgaacccatgagagaaatcaacaggttgatcaatgaagcaaaagtcagctcaaatggtgctttaagaaattattatacagcttattacacagaaattaataaaattaaccagaaagtaggagatgcaaactccgaactggcaacatatcctgaaaagcagagaaaatatttggatgcagagagaggatataacatgattgaagctacctacaacagcttgctgacgagacagaatgatactcagctaagaatggcagcaaaccaatcggacatcagcgtaatcgaccctgctaaaaatgtaggacagccgccgataggtcctaatgtaaaggcaacaaaagcggcaattatcggaggacttcttgctttgccgttactgtttattctgctgggtgagatactggacagcaagatcagaaacattaaagaattgcttaatgcaactaaaattccgcttcttggagttatcggaaacaacagtcatgagaatatgcttactgttctggatcagccaaaatcttccgtttcagaagctttcaggggagttagagccaatgtaagattcttatccggagaaaatggaggaagtaaggttattttggtaacttcctctgttggaggtgaaggaaaaacctatgtttctattaatttagcttctgttctcgggttaagtgataagaaaacaatccttttgggaatggatttgagaaagccgaagattttcggagactttaaaattgacaataaatttggaatctcaaattaccttacaggagaagtggaaatgagccagattatcaacaaaacaagaattccgaaccttgatgtggcaacttcgggacctattcctccgaatccgtccgagttattaatgagtgataaaaatatcaagttcattgaagaccttaaagagatgtatgattttatcatcatcgattctcctccggtaggtcttgttgcagattcttatgaactgatgaagcactcagacgccaatatttatgtagttcgtcatgaatatacggagaaatatatgctgaaaatgattacagaaaaatatcatggcggagagatagggcacttaggtcttgtgtataacgactacaatacaaagcagggttatggttacggatacggctatggatacggttatggatatggttatggctattttgatgaagacaaaaattacaaagaaccaatgctgataagaattagaaataaagtacagtcattattcaataaaaaataatacatttaagccctcatttaatgggggtttattatatcatgataattttcattctattaaaaaaagaataaatttgctagtttgtcgtttactttataacaaattatgtttttttgtttatttttaactaaacattaagattatcattaatataaaaaagttttatatttgcaaaaattaaattttaaaataaccataaatccatattcttttatgaatagaaaattattgtttagcttccttgccgctctaggaactgtggtaagtgttaaagcacaaagaaacgaacttggagttcgtctaggtatgagtaacctagttggggatatagggagaacgaattatattttacaaaagccattggatttaagtaaagcgtcagattggggtgttcctttttatggtggaattttatacagatttaattttaatcctcaccagactgtaagattggatcttggatataatcagatccagttcaacgataaggtggcgaaagaagaatatagaaaaaacagaaactcattcgggaaaaataatgtttacgaagcaagcttagtctttgagtacaatttcttcccggtaaacaacgagcagaaaagtatggtaagcccatatattttcggtggggtaggagctttaatgttcgatgcgcccaaagctacgttagttaatgatttcagaagagatgcagatggtgtggcgcaggctccgattaatgagctggattttacaacaactccggtgtattctacaggaaccaaaaccacaatgcatattccttttggagtaggtttaaaatataaatttaattataactgggcaatttttgcagaagctacatttagatatacgcttacggatcagttggattacagcaaaattcaaagcaaggatgtagtggctacatataacggagatattctgagccccgttacaggcggatctcttttgcagacagatgcttattatgtagtgtctaaagaaagagaagctgcaattataggagaaaggaacgttggagactttaagtctaaagactggataaatacagtgagtcttgggcttacttattcgtttggaagacctccatgttattgtgattaatatgtcgttgataaaagataaaataaatcctgagaatttaccacagcatgtggctatcatcatggatggtaacggaagatgggcaaaatctcgtggcgaagaaagaacctttggtcacaagaatgccattgatgcggtaagaaatgccataaatgcgtgtaatgagatacatattccgtatttaactctttataccttttcttcggaaaactggaaccgtccggcagaggaagtaaatactttaatgaatttacttgtagaaaccttattgcttgaagcggaagaaattttcagcaaagggttaagaatgcatgttattggaaatctcgaaaaacttccctcacttgtaaaagatcagcttttacgtgtggtggaacttacaaaagaaaacacaaaaggcaatttggtactggcaatcagctatggttcgcagcatgaaatactaaatgccgttaaaagcatcagcgaagatgtaaaggaaggaaaggtagacattgaagacatcgatgaaaaattattcgaaagtcacctttacacaaaagattttccacccgtagatcttttaataagaaccagcggtgagatcagaatcagtaattttctcctttggcagatcgcctatgcagaactgcagtttttaaacgttctgtggccggatttttcaaaagatattttctttcagtgtattgtagattatcaaaacaaagaaagaagattcggtaaaaccggagaacagataaaaattcagtaaaatttaagaaaagaaagactacgataaaatgaagtttagactattacccatcattatgtttgttgcttctgcacatttttatggacaggtaactccacaggacagcacacaggtgagcaaatctgtacaagcagaaaaccaagcagggacgtacaccttaaaagacatcgttgtagatggggttaaaaaatatacgccggctcagatcctgagatttacaggtctggtaaaaggagaatcagtagatattccggggcagaaaatcagcaatgcggtaaaaaaactttgggacactcaatctttttctgaagtagaagtgtatgtacaaagtattgaaggcgaaaccgttattctgaaattttatctgcaggatctgaaggatcttggagaggttaaatttacgggtaaaggaatcggaaagtccaaaaatgaaaaaatggctaaagacaataatctgaagccgggaacaaaaattacacagaacttagtttcaagtcttaaaacaaacgttcctaaagatttcattaaaaaaggatatgcagatgctaaaatttccattcaggaaaaagtaaatgcaggagatcctaatttagtagactggacgattaatgtagataaaggcaaaagaatcaagatcgatcatatcgaattcgaaggaaatcagtatgtatccgacagaaaacttagaaaaaaagcctttaaagaaacaaaacaaaaaagattcggtattggcggaatcctgaaatcttcaaaattcattgaagataaatatcaggaagacaagcaaaacctaatcagctattataactctttaggatacagagatgctgctattgtttcggattctgtttggagaaacaaaagaaacaattatgagatcaacgtaaaacttaaggaaggtaaacagtattacatcggagatattacgtttaccggaaatacggtgtattctacagactatttacaaagacttttaggatataaaaaaggagatatctacgatgcggtaggcttcaataaaaaagtaggagaagacggaggtaaagaagacgattcggatatcaaatccagctacatgaacaacggttaccttttctcaaacgttacaccggttgaaaaatctgtagacggagataaaatcaatcttgaaatccgtatcaacgaaggtgaaaaagcaacttggaataaagtaacatgggaaggtaatacaactacccatgaccacgttattcttagagctttaagaacaaagccgggaaatttattcgctaaaagtgatatcaaaagaacatatttcgatttagctggaatgcagttctttgatcctcaacaggttgggcaggatattcagccgaatcagcaggataatacggtagacatcaactggaaattagtggagaaaggttcttctcaggttcagttacaggcaggttacggaggtaacagcttcatcggaactttaggattaacattcaataacttctctttaaagaatttccttaaattcaaagactttaagccggttcctcaaggtgacggacaaactttatcgcttcaggcacaggctggacaatattttcagaattatggaatttcatttacagaaccttggttgttcggaacaagaccaactgcactttctgtaagtttaaataactcaagagtaaaatattctgatgtttacggaaatgcacagaaactgaatattttctcagcttcagtaggtttgaacagatatttgagatggccggatgattatttctcattgtatacaggtcttcagtaccagaagtacgactttaagaactatccgttccagtttggagatgctacagaatattatggttctgccaacaacttaagtatcaacttaggattaagcagaaactcagcaggtatcgacccaattttcccgacagttggttctaatatagacttatcggtgaaatttacgctgccatattcagcattcaacaataaagattactctactttaagtcctacagagaaatacaagtggatggaattctataaagtgaagttcaaagcagatgtttataacgagattattggtaaattggtgttgagatcttctgcggaaatgggcttcatggacggctataactctaaattgggagcaccgccgtttgaaagattctatgtaggaggtacaggtttattcggaggtagatatgatggtagagaattaattccgttaagaggttatgaaaatgcttctacctacggaggaacttctgaagatattactccaacaggaggaggtactatttataacagatttacgttagaattaagatacccgatttcattgaaccagactgcaaaaatttatgcattaacgtttgcggaaggaggtaacgtttggaattcttggggaaattataatccattccagttgaaaagatcagtaggtatcggtgtaagagtatatatgggagcatttggtttaattggatttgatttcgcttacggattcgacaaaacagtttcaggaactgagccttctggatggaagacacacttcttgatgaaccaatcattataatccaccctatgaaaaattttagaattgttttatcatttgttttattcctgcttttcggtttaagcaatgcacagaaagtaggcgttgttgataccgaatacatcctgaataaaatgcctcaatataaagaagccgaagcaagactgaatgcacagattgatacatggcagtccgaacttcagaaccttcagtctgaatacgaaagaaaaagatctgcttttgaaagtgaaaaagttcttttgataggcgatcagcttaaattgagagaaaaagaagtaatggatctggaaaaaaatatcaaaacaacaaccagtttacgttttggagctaccggagaaattaagaaactgagaacaaatctggttcagccttttcaggatcagatctgggaagctatcaaaaccatgtctgaaaagaacggtttggcgatagttttagataaaacaagcaataatgttatttttcttcagaaaagatccgactattcggataaagttttagcaatcttattaaaagatgctgaacccaaagaaaaaggcaaaacaaaaaaataaaagtttaacttttattacatttacaaatctaaaaacaaaattaaattatttatttaccagttatgaaaaaattaagtgtattatttgcagcggtaatgatggttgtatcggtaggtatggcaaaagctcaaaaaattgcaactttagatgttataggaattcttaacgcaatgcctgaaaagaaaaaagcagatgcggatcttaaaactttcttagatactaaacaggcagaaatcaagaaaaaagcagatgcaggacaggctaaattaaagcagtattctgaagaagctccaaagaaaacagctgaagaaaacaaagcaagagaagcagaattggcaaaaatgcaggaagaaatccagcagatgaacgataaagctcagaaagatttcgtggctaagcaggatcttgcttacgaaccaatcgagaaaaaactgaacgaggctgtgtctaaagtagcaaaagctaacggttatgactatataatggatgcaaattcttctgcattcgtattcaaaggaggaccagatgcaacagctgcagtgaaaaaagaattgaatattcagtaattttttagaaattaataaatatttataaacatgaaccatctcacttcgaggtggtttttttatttttgcggaatggaaaaagaagtatcaaccacggtaaaggtcagattcagcgactgtgatcccattggtcatttaaacaacgtgaaatatctggactacatgttcaacgccagagaagatcatgtggaaacattttatggtttcacgtatgaagaatacaccaaaatgacgggatgcacgtggattgcaattcagaatgaaatagcctatttaaaggaagtacggtataatacctcggttgttatcagcagcaaaaccattgaagtggcagacagaacggcaaaagtggaaatcctgatgaaaagtttagacgagaaaacaattcatgccgtattgtgggttacggtaatctactttaatgttaaaaccagaaaatccgaagtacatcccgaagaaattaaagaaacattcaataagttttatgtagatttggaacagaaagatttccagtcgagagttaaatatttaagatcacaaaacgcgagaaactcatgatgaaaaaaattttagtagtaggaggaaacgggcagctaggaaactgcatcagaaaaattgctccggattttgagctggattatgaattcatttttacagattcacagactttagacatcaccaacgaagatcagatcaatactttttttacggaaaataaaccggattactgcatcaacgcttcagcttatacagcggtagatcttgccgaaactgaaaaagaaaaggcttttgcggtaaatgcagaaggagtggcttcccttgcacaggcgtgtaaagatgctaaaacaacgtttatccacgtttccacagattatgtctttgatggagaaaccaatttaagttattccgaagacgatttcacaagtccgatcggagtatacggagaatctaaattaaaaggagaagagcttgcactggaaattaatcctaaaaccattattttaagaacttcatggctgtattccgagttcaataaaaattttgtgaaaacaatgctcaatcttttttctcagaaagacgagttgggaattgtggcagatcagttcgggcagcctaccaatgcgaacgatctggctgaagccatcatggagatcattgaagctaaagaaaaaaaatacggagttttccacttttcaaactatcccgaaacaacctggtttgaatttgcaaaaaaaatagctgaattttctaaatcttcagttaaattaaatgcactaaccaccgagcaatatcctacgccggcaaaaagacccaaaagaagtacaatgtgtctggataaaattgaagaaacgtataaaatagaacccaaatactgggaaaatagtctcgaagaatgcgttaccattcttacacaataatatatatagaatgaaaaatctcatcatagttgctttcgcttttcttacccagctttgcagcgcacagaatgtgtaccttacgaaagttcaaaaaacgaaagagaataccgataaattcctgtacaaaattaatgaagaaataaaagatgccgaatatttgggcgaagtcgaagttcagggattctggaaatacgacgatgaagtttttttattagtgtataagaaggcaaaagaaatcggagccaatgcattttcatggaagccttttgaaaatatcgatggaactccccagaatttcaatccttccaattacagattaaatctttattttcttccaaaagatcaattcaaagatcagacaggatatatgtacattttcgcttcttcagaaaaagatcagaaaatagcgatcaataagaccgattatgtactttcgccaagatcatacctgaaactgaaaacggtttccggtgaagtctatacaatttcaactaaaaagttattaggctcaaccatcaaaatccagcctaaagacaatagttctaatcagtatttccagatttcggctacaaaaataaaatcagacgaaagtggagtaggcggacttaatctaaaaagtggcgatatcatcggtctcgaaaaatcctacggagaatttttaagcaccatatataataaagaaaagcagagtaattaaactctgctttttcatttataaataatttccttgcttcctcaaaaaacttttcttcttcatcttttttctcagcccacaaactcctttctctccaacacttccaccctcaaaccatccatttcccattcaatccaacaaaatttttcttcagaactcaatatttccgtctgttttccatgatttcactccccactcaacggtttttccagaactaaaaatatcaaatcgactcttgtggaaaactatggacaaccatttaaactcnnnnnnnnnnnnnnnnnnnnnnnnnnnnnnnnnnnnnnnnnnnnnnnnnnnnnnnnnnnnnnnnnnnnnnnnnnnnnnnnnnnnnnnnnnnnnnnnnnnntatcaatagattttcgtcaaaaagcatatctttgtttttcatgaggtgttttagtatttgttcaattctaaaatattaattttagacattaagcacctcatgtttttctccgaattcacgttaaataagagttttggtttcggcggcttcgccgccgaaaccaaaaccaaacaaagaatccggcggagcaaagctccgccggattcaatataaaaatagtcaatttacttttccagttgcttataacttctctggatgaagtccgtaagctcttttcctttcaatagattctgcgaaagtttagcaagatccagagcatatttaatcagatgtgatttcgcttctgtattttctgtttttaaaatctgacctgcaagttcgctgttggaatttaccaccagattatacatttccgggaatcctcccattccgaacattccgccgcctcctgttgcctgcatatctttcattcttctcataaattcaggctgggtaatggtgaaaggcgcatcattgctgtctaaatcttcaagctgaacggtaaatttggtatcgttgattgattcttcaacgtttttctttaaagattccttttcagtctctgttaattttgaaataacaggttcatcttttttaatcagattgttgatatgatctgcatctactcttgcaaaagaaattttatctttggatgtttccagtttttggataacgtgaggaataatcggagaatctaaaagaagaacttcgtatcctttatcttttgcagactggatgtaagaatgctgttcatctgcgttggaagcgtacagtacaaccagttttccgtctttatccgtttgattaggcttgatcttttcttccagttcattccaaaggaaatattttccgtcagtggttggataaagagtgaatttatcagctttttctgcaaatttttcttcagtaacgattccgtattcgatcacgactttaatgtcgttccactttttctcgtaatcttcacggttttcgttaatcaaagatgccattttgtcggcaactttttttgtgatgtatgaagatattttctttacggctccatcagcctgaagataagaacgggagacgttcagcggaatatccggagaatcgatcacacctcgaagaagcattaagaaatccggtacaattcctttcacttcatccgttacaaaaacctgattctgatacaactgaattttatctttttcgatatttaaattattgtttagtttcgggaaaaataaaatccccgttaaattgaacggataatctacattcaggtgaatattaaacaaaggctcctcaaactgcatgggatacaattcgtggtagaacttcatataatcttcattcgtcagttcgttcggcgcgatagtccatgccggagtcggattgttgataatattgtcaacttcttccgtttctgcaaccgcatcttcaggagcatcttccggtaatggaagcgtatgagtttttgttccgaatttaatgggaacaggcataaatttgttatacttcaacagcagttcacggatttttccttcttccagaaactctgtagaatcttctgcaatatgaagaataatttcagttcctctgtctgttttatccgtagtttcctctaaagtaaattcaggacttccgtcacagatccaacgaacagcaggttcatctttgtaagattttgtaagaatttctactttttctgcaaccataaatgcagagtaaaatccaagtccgaaatgtccgataattcctgaatcttttgccgtgtctttgtatttttccagaaattcttcagcacccgaaaaagcaacctgattgatgtatttttcaacttcttcacccgtcatcccgattccctgatcgatgatgtgaagttttttgttttctttatctacttttacttcaatcttcggatttccgtattccacttttgcttcaccgatgcttgttaaatgttttagctttaacgtagcatccgttgcgttggaaattaactctcttaagaatatttcgtggtcactgtaaagaaattttttaataagcgggaaaatattttccacagatacattaatatttcctttagtcataataattttggttttttaattttctatactttctcaaaaaaaataccgtttcaaggaaagtgacattttgacattttttttcagaaaaggattgttgaagatcaaaatttctcaaaagaataaaaaccagcattttttttaatactgatattttctttttcaatcagatatctgagttttaaattagacatcccattttgtagttaatagtttatcctaaaaatacctttataaagcagatttatccgcaaaaagccttatttttagttcttaaaatatttaataatgaatttgaaaagtgtagttttgcttctgtttctcatggcttcgtatgtctatgggcagaaaaagccgttggatcattcggtttacgataattggcagaatatcggagccagaaaaatatccaatgacggaaaatgggtaggatattcagtagatgtgcaggaaggaaatcccgatctttacttacattctgtaaaaaataaaagcacaaagaaatttccgagagctacaaaaatggaatttaccagcgattccagatttgccgttttccagatccgtcctttttacaaggatataaaagccgtaaaagataaaaaattaaaacagaataaactgaccaaagacaccctcgctgtttttgatttcactaaaggaacgacagaaaaaattcctaatgtaaaaggattcaaaattccggaaaagggaggctcttttgtggcttatctgctggaaaatatgaaagacaaatcttccgacagtgcttcagacaaagatgatgacgacgaaaacaaagatgatgatacaaaggcaaaaccattacagttggttatcagagatcttttgggcggaaaaagcacaacctatgacaatgtggttcgctatcagtttagcaaaaatgggaagcagcttgttttcgttacaaaaaaaccggaagaaaaacctaaaaaagggaaggaagagaaaaaagattcattggaagataaatctttggctaaaaaagatacggataaatccaaacctaagaaatatacgcttcagacagttcaggttgttgatcttaagaccggaaacgtcaataaaatctcagaaatggaaggagatttctcacagcttgcatttgatgaagaaggaaatcagttagcttttgttggaacctcttctgcacagaatgatctcgtaaaactttaccaattgtattattttaattttaaaggaaataaaaataaaacggtaaccaacgatcattctcaaatgaagaaaaactgggtagtttctgaaaaccgtttaccgatattcagtaaaaacggaaaacagttgtatttcggggtggctcctaaacctgttgcaaaagacactacattgattgcaaacgatcatgctgtggtcgatatctggaattataaggatgattatctgcaaacggttcagttgaaagaattgagaaatgatcttaaaaaatcttacgctgctgtaatgcagaccgacaaaccggaatttttcaccaatatcgacggagaagatctcgacactttacgactggtgaatgaaggaaatgcagagtttgtattgggaattaccagtttaaacaatcgcatctcttcacaatgggaaggttctgaaaagaagacctattttattattgacaataaaacaggcgaaagaacagaaatcattaaaaacctgaatggctcagttgccgtttctccgttgggaaaatttgtcgtgattttcgacagggaaaaaggacaatggctgagttataatgtaaaaacaaaacagacagtaccgctcaataaagatttgtccgtttcttttgtagatgaagagttcgacatgccggattttccaaacgcatacggaattgcatcatggacagacaacgatgaatccataatcatcaaagaccgatacgatctttgggaattttttccagacggctctaaaaagcccagaaacatcaccaacggattcgggcgcaaaaacaagattacttttgatacgtacgatttagacaaagacattaaaagtgtaaaccgaaaaagatcgatttatttgtcagcatttgataatatttccaaagccaacgggatttttaaaacgaccattcagtcagatgctaatcctgtaaagattcacatggaaaatgtttggggataccgcagtctccaaaaagcaaaaaatgcagaagattatattttagtaaaagaatcctacaccgattctccgaatattttcaccacttccgattttaaaaatcaggaaaaactaagcaacaccaatcctcagcaaagtctttacaattggggaacgagtgaattggtcaattggaagactccgaaaggaaattcatcaataggcgttctctacaaacctgaaaatttcgatccgaacaaaaaatatccgatgattgtttatttctacgaaaaactatcggataatctgaaccgttacgtagcaccgtctccgactccttcaagattaaatatttcgtatttcgtaagcaacggatatttagttttcacacccgatatttcgtatgtagatggttttccgggagaatccgcaatggaatatatcaattccggtgttgaaaagctgaaagaaaattcatgggtgaatggctcaaaaataggaattcagggacaaagctggggcggttatcaggttgcctatctcattgcgcataccgatatgtacgcagcagcatggagtggtgctcctgtcgtgaacatgacttctgcgtatggcggaataagatggtcttcaggaatgaaccgacagtttcaatacgaaaaatcacaaagcagattagggaaaaatctttgggaagctccttaactgtatattaaaaattcaccgctttttaccattgatcaagtgaaaactccggtggtgattatgagtaacgacagagacggagccgttccgtggtatcagggaattgaaatgtttactgcattgcgccgtttaggaaaacaagcttggctgttaaattataatggtgacgaccataatcttataaaacgccagaaccgaaaagatattcagatccgcgaacagcagtttttcgattattatcttaaagatgcgaaagcgccggtctggatgacgaaagggattcctgcaacccaaaagggaaaagactggggatttgaattaaccgatgaaaagccttagtgtgtaaacaacgaatcggcggagctgaaagctccgccgattcgttttatcgttttatcaaaaaacttatttattcttaagttcttctttaattttgttttccagttcttctgcaagttcaggattgtcttttaagacatcttttactgcatcacgaccttgtccaagctttgtttcttcgtagctgaaccaagaaccgcttttctttacaattccctgttctacagcctgatccagaatttctcccgttttagaaaccccttcaccgtacatgatgtcgaattctgcctgtttgaaaggcggggcaactttgttcttaacaattttcactttcacacggcttccgatcgcttcatctccctgcttgattggcgcacttgcctttctgatgtccactcttaccgaagcatagaatttcaaagcgttaccacccgttgtagtttcaggatttccgaacattactccgattttctctctcaactggttgatgaaaataaccgtacattttgttcttgaaatggttgccgttaattttcttaaagcctgagacattaatctcgcatgaagtcccattttagaatctcccatttctccttcgatctccgcttttggcgtaagcgcggcaaccgaatcgatcaccacaatgtcaatcgctcccgaacggatcagattatcagcaatttccagtgcctgttctccgttgtccggctgagaaataataaggttttcaagatcgattcccaattttgcggcataagttctgtcgaaagcgtgctctgcgtcaataaacgctgcaatacctcctgctttctgagcttctgcaattgcgtgaagcgttaaagttgttttacctgaagattccggaccatagatctcaatgattcttcctctcggataaccacccactccaagagcgatgtccaatcccaaagatcccgaaggaattacctcaattgtactgtctacggaattttctcccaaggtcattaccgttccctttccgtatgttttatctagtttgtccaacaccaaagccagtgcttttttcttatcgtctatattactcatctgatgtttaaataatttatcaaaaatacaaaaatttacgctcaaaaactaatctttcctaccactaaaagttgtttttatagttaaaaaaacataaaattcagatgcatatcaaaaactaaaacagaatctttaaaacttttgttttatgctttatcaggagctttttcgcgctttccgctgcaatcttttttttcaaaaaaggattttcgctgcaatgcggctagggtagaaatcatcaaataaattgcagtctttgcagtagatttttaatggaaattagaattttgggtaatgctgagataatcgctcaagactttcatctgatctttattccctttttttattctggctttacggcttacgagtcggtcaacaattttggtaatcattctttttgtcaccggaaaagcctttctgttggaaacttccggaattttcagtcttttgcacacttcatcatccagcaaaaaccaggtacagcagatgtggagataacgcagattctttctctggaaactgtatttcaggatcgggttttccagcgattcgttcagaagagaatgagccagcaaaacagaatcttcatccgcagaaggctgaaccgaagtccacagatagaaatactgcgttgcctgtactttatcattcggtaaaagatcctccggaattcccagaagataacctacgtatttccaaaggtggaaaagccctttttcttcctcttcagaaaacgtgtttcccagtttgtgcagactgtgcataaaaacaagactgaaaccaatatacgttgccatcatatcccatgaattaatgggttctccccagtttttcgtgtcccattctttataatatttcttaatggaaactcttgcgtaagaatggatcaggcgggtttttatggcaaattcatatccttttttatggacttccaaagcatcatatcgggtaacatttacccagaaatcaagcgtttcagaaagtctttttacagcgcctttctttaatgcttccgttgcaataaggggtttgttgaggtaagcataatcataacctccgatcagacagtaatcgcgaagagagatcagagaatctacattgcttctcatgcagagttctgcaccgcttttaatcagatcataatccagccagtcaggaattttctgagtctgcaggaaaagctgttttacactttccggaacatcatcgttctccgaaacgccatttcggatgtaaccttcaatttctcttgaagcttcatgaaatttttgagtgagataaacatcttttacaacctgatcgccgacttcatccacatcataaaaataagatgaaaacttttcaaaatctttaaaaccgacttctgctcctgaaaaatcaagaagcagttttccgttgcctttcgtccagaaatctataaaatgctgcgaatctttaaagcgtggctgtaaaattgttttctccatcgaaggctaaaggtacaagttttgctccgcaattgcagagtgagatttatcaggaaaaactattgttaataaattgattattcacaattaactattcactattcacatttgacattttatatcaatccccattcaaacgcttttgttaacagttctttgctgtttctggagttcgttttggctaagatattctttctgtgagtacggacagtatgttctgataaaatcagcattttcgaaatttccggtccggaatatcctttggcaataagtgaaagaatttctgtttcccttttggttaaattgatttcctgatctttttttgaagaagaattttcaattttaatctgaatgaaatcgctccgatgaccaattcctgtaatcagtacagtatgcggattctgttttgtaatatgatggatgttggtatggatgttaacagactgaaccagatttttatcctcatcttcccacgtaagtaccgcctgatgatgaaaaagctcgtaatttcctgaagcggttttcattctgaagcagtaactggatttaagaaaaagctgatgttctttccctgttttcatcaatatttctaccactttctgttcggctttcataatgaattctatatcatcggggtgaacgagatcaatcacatcttttagattctgtggatattccttcaaaccatgtatcttcaggatgtcaggatgatgattggaaattgtactgttggtgagatttagcacataataataaaattctccaatggcaaacatttctccgatgatacgttcaacaggaggaatattagaaatgtgtttttcttttctttctacatcagaataagagttccaaacttctaccaaaggatgttttttctccagattatccataaaaaagatttataactaaaaatagttaaagttttcttaaaaataccgcaaaagggggatttttttacatcaataaaattttaaaatttgtataagccaataatcatgaaaactcattctaaatatttttccgttttttcggattatgttttcatattttctataaaaaaacaaaatttacataatatcattaatatgtcagaaatagtttagaattttctgttagctgtttgaaaatgataaactggaatcctctgcaattttgcaggggattcattattatataagcttactgtttaaaattaatttattgagtttaactttccggtccacgatagccgaatatttgataaatatagaaacccagaatgagagcataaaataccgaaattaccgtaagaataagaacaacaatgttatttttgctttgtttggtaaaaaatttaataaatccatacgatattattaccaaaccgatcgcgaaaagataaaatatatgtccggaatagataagctgcaatccccataaaactcccccaacagttccgccaagaattcccccgagaatacttccgatgtatgtacttgtttttatttctacgtcttttttctcagcttctattctgctgctcacaaggtctgtaatttcctgaatttcttctgtggacagtatttcagaatgtataattgaattaatatcatttttagtattcccttttttataaagctggttggctttacgatgaagtcttctcttttcttcttctttttttatgagttcattatatctttctttcagagtattgaagccgcctttattttctataactatttcaagcgctttcctcgcatcttcggtatatccgcttttatttttatagacattcataagctcagaatcggaatattctgaatatctttcaataagttcatccagcatgtttattaattttaagcggttaatttaaacaaaaaaaccttccgatccggaaggttttcatattttaagctgatactttattagttagataaagaagcagcgtggatcagcatatctactaacttgttagaataccccatttcgttgtcataccaagaaacaagttttacgaagtttggagaaagcataattcctgcatctttatcgaagattgaagttctcttatctcctacgaaatcctgagaaactacagcatcttcagtatatccaagaatacctttcaattcaccttcagaagcagctttaatagcagcacagatttcatcgtaagaagtagctttttctaatcttaccgtaaggtcaactacagaaacgtcaacagttggtactctgaaagacattcctgttaattttccgttcaaagaagggataacttttcctaccgcttttgcagcacctgtagaagaagggatgatgttgtttaaagcagctctaccacctctccagtctttcattgaaggaccgtcaaccgttttctgagtagctgttgtagcgtgtaccgtagtcattaaaccttctacgattccgaagttatcgtggatcacttttgctaatggagccaaacagttggttgtacaagaagcgtttgataagattttgatatcgtctgtaagttctgtgtggtttacacccattacaaacattggcgtatcatctttagaaggagcagaaagaattactttctttgcacctgcagcaatatgttttgcagcactgtctttatctaaaaataaacctgtagattctacaacgtaatctgcacctacttcgttccatttcaaattgcttggatctttctcagcagttactctgattctttttccgtttactacaaggtcattaccttctacagaaacctcacccggaaaaactccgtgtacagaatcgtatttaagcatataagccatgtatgtagcatcgataaggtcgttaattcctactacttcgatgttatctctttcagtcattgctctgaaaacaagacgtccaattctaccaaacccgttgatacctactttaattgttgacataatagtttgttttaaattatattaaatattagattgctaaaatttctgaaatcagtaaaagatctttattgatttcgttgtgttttttaatggcctcttcaatcggagtgtataccaaatcattggaacgcattcctgccattacgttggtttgcccttccattaatcctgttacggctccaaagcccagtctgcttgctaacactctgtctgcgcaacttggagaacctcctctttgcatgtgtcccaatattgcgacacgaatatcatagtctgggaattccttctttgttttttctgcaagttcatacacgttggctaatttttcgccttctgcaacgacaactatgcttgaagcttttcctgttttttctgcgcttctgaaattggcaaaaagttcatcgatgctgtcttttttctcgggaatcaaaatatccagagcaccggttgccagtccgctgttcaaagcgataaaacctgcatcacgacccattacttccacaaagaaaaccctgttgtgggaagttgccgtatcacggattttatcaatcgcttccattgcagtattcaaagccgtatcataaccaatggtgttgtccgtcccgaaaatatcattatcaatcgttcccggaacaccaattacacggatgccgaattcttcgttgaagatttttgctcctgtgaaagttccgtctccaccaatacagaccaaaccgtcaatgccatattttacacaattgtcgtaggctttttgacgaccttctttggttctaaattcctgtgatctggcagatttcagaatcgttccgccctggttgattatattttttacggaacgaggtcccatcttaaggaaatcatcgtggattaagccattataaccttctcttactccgtaacattctattttataataatttgcggttcttactaccgcccttaatgctgcattcatacccggagaatctcctcccgaagtaagaactgcaattttttttacagcactctctttcatctagtaaaaaatttcgaacacaaatttacaaaaacaagttcagataatcgtagtaacttaagaagagttttgcatataaatgattaaacctgaataaaatttatcggtttacaaaaaaatatcaatgtttttgaatgaaaattatcgagatgaaaattaatttaatgcttttcggtaagatatttccagtatctcctcggaacgtgctgaatatgaagcctcatattttttctctccacgatattggtttttgtgaaatacctttgccaaagcgtctgataatttttttcttcatcgtgaaacttctgctgatatcggttcagatctattttttcatcgggatagaaaaaatcgcaggtttccaaatcgtacagaattccgtaatttcttctcaaatcataaatcatccatttctgatcctgataacggtctttaaaatgtttccggattaaaggcagtacattgaaatccggatctattttggcgaaaaaaacaccgtcctgcattttttcaaaccggacaaaagccgtcattctgtgtctttcccgacttactgatttacagattttagaaatcttcagaatgtcattgtctgcataatttttcaggatattttcatcgggatgttttacagattgctttacggcagacaaaataagctgttccagttccggatcttcggataaataaaccttcagaagttcgtgaattcctgctttttcaatattcttttctaatttgtttaaaaccctttcagatttatcattttgagtaataacctcatgaatttccgcaaagatattttcctgatgaaatctttccctgcttacaatttccacatctttatatttatactcgaaaacttcgaatacagcggttaaaagtccgtcgaaactgccgtcgtagagtagggtagtcatctgagttggaagggagtgttttagtgttttagagtttgtaatcttgtgttattatgttgatgttatttcagtatttataatattttgctacaggaaaaatttcggaatatctctgcttccgtgcaaaactctcacaattctgatatgatgatctaaaatcctgtaaaaaataacgtgattgtctttcggaaagctatataaaactttttttatttcatctcgctttttgcctaaatgtggatttaaaaataaattttgaaaaatttcttcaatttccaaaagatatgtttctgcttgattaaatccaaattcattcaaagtataatcaaaaatatcttccagatctttatcagcaatttccgataagatataggttttcttagacattgctgattctgttctttttagcctgaataatatcctttacagaacgagagctttcaacatcattccagcctttttctatttcagcttttaaatcctgaatcacacggtgccgataaacttcatgaagccgcaatgcatcacgcacaacttcactggcattctgaaaatcaccggattctatttgctttgaaatatattcttcctgcttttttgtgaaactgacattcataataaattctttcttcgaagttataaattatatccaaatttagcaaatatggatattggaaattgttttctccacaagataaaatcaaaggattgaatttaaaacaatgtcaactgctgcgaaaactgattatgaaatttcgaagaacttccgccaatcagtaattttttaagattttgattcgtcagatattttaaaaaggcgtttcctgagttaaaatcaatgaaatattttgcgcggtttactgctgctcccaactttttaagatgatccatattcagaacctgaaaacgtcttgcacttacaattttctgtgctgtttttaccccgattcccggaattcttaaaatcatctgataatcagcagtttgaagattaacaggaaactgatctaaatgtcgcaaagcccagcttaatttgggatctacttcaagatctaaaaatggcatattcgaatccagtatttcttcagctttaaaaccataaaaacgcatcagccaatccgactgatacaaacggttttcacgaagcatcggaacttcagtcgtaagagcaggtaatcttttatcttccaaaacaggaacatatccggaataatatactcttttcaggctgaattttttataaaaatgatcggcaactttaatgatctgtaaatcattttcattcgtagcgcctacaatcatttgcgtagattgtcctgcaggagcaaattttggtgttttccggaacagttttttctcgtctttgtattgcgcaatcccgttctggatacacttcatcggattaagcatatcctgcctgtttttttcaggagccagtaatttcagcccgctttcggttgggatttcaaggttgacggataaacggtcggcgtacaaagcggcttcctgcatcagttcatcacttgctcccggaattgattttaaatgaatgtaaccgttgaaattttcttccagacgtaattttttcgccacacgaaccagacgttccatggtcgtatccgcatttttaaaaattcctgagcttaagaacaagccttcaatataatttctgcggtaaaaattgatcgttaaatctaccacttcctccacagtaaaagcagctcttttaatatcatttgaacttctggaaacacagtaagcgcaatcgtaaatgcaatgattggtcaataaaattttaagaagagaaacacatcgtccgtcttccgtataggtatggcagattccgcttgcggaactgtctcccaaagccccttttttgttctttctcgaaccaccgcttgatgagcaggaaacatcatatttcgctgcatcggcaaggatttcaagtttttctttcagacggtcaaaattcattttattcttcttttaccaattttttattaacacataagttacatcagtttccaacaaaatactttgaaaatatttagatctcataagaaagaaaatcaaagattttaaaaactaaagtgttcttattttttgaattatttaattctaatataacttatgggttaaaaaatcaattttaattaagtttaaaattttatatttttcgttcaaatttaattccaaaattgataaatgtcaatcttttttgatagaagttatcaacagtttaaagtgacaaatttagtatatttacgctcattaaatttatgttatgaatcataaacccgttgaaggtttttccaaattaacaaaacagggaaaaatcgactggctcgtaaacgagtatcttgaaggaaacgaagaatatcaaaatatattaaaccaatactggaacgaaaatgctgatttgcagaagcttcacgacgaattttctgaaaataccatttccaatttctatatgccttacggaattgctccgaattttctcatcgacggaaaactgtttgcgcttccgatggcagtggaagaaagttctgtagtggcagcagcttccaaggcagcaaaattctggatcgataaaggtggttttaaaacaatgatcatcaacaacgaaaaactagggcatacccactttatttttaatgttgaatctcataagctgcttcatttttttaattttaaactgaagaaaaaattactggaagctactgaagatatcacagcgaatatgagaaagcgcggtggtggaattttagacatcaaactggttgataaaacatctgaaatgccgaattattatcagttgaaagcaagtttcgacaccgtagattcgatgggagccaactttatcaattcctgtctggaacagttcggaaaaacattgaagcaggaagtggctacaagtgaagatttttctcaggaagaaaagaattctttacagatcgtgatgaatattctgtccaattttactccggattgtatcgtaagagctgaagtttcctgtaaaatcgaagatctgaaagacgacagcggaatttccaacgaagaatttgcatggaaattcaaacaggcggtaacgattgctgaaattgagcctttccgtgcgaccactcacaataaaggaatcatgaatggagtagatgcggttgtaattgctaccggaaacgatttccgtgcaacagaagcctgtgctcacgcctacgcagcgagaaacggaagatattcatctctgactcattgtacaacagacaacggtattttcagattctggatcgatcttccgatttctgtaggggttgttggtggtttaacgaatcttcatcctttggtaaaattctctttagcgcttcttggaaaaccttctgctcaggaactgatgagtattttggcggtttcaggattagctcaaaattttggagcattacgttctttggtgacgactggaattcaaaaagggcatatgaaaatgcatttgctgaatattttgaaccaattgggcgcaacagaagaagaaaaacaacattttgtgacgtatttcaaagataaaacggtgagtcatcacgaagtgatcaatgagtttaaccgaatgagaggacaataatgtttggaattattgtagctgcttttatgcttggctttggaatttttctgaaactgaccaaaaatccgggtttcacccaaaataaaaaattcgcatggattttatcggaatcggactcgtatcattaatattcaagattttaaattataaatgaaaacaataacattaattttcggtgctgtttacggcatgctttccgttattctgggagctttcggagcgcacgctttgaagaaaatattgtctgtggaaagactggaaagttttgaaacgggagtgagatatcaaatgtatgctgcattttttcttttaattgcaggctacattttaaaatttgaaaccaaaacagagaactggatttcgtggtttatgattttcggaacgatgcttttctcattcagtatttacggattgagtttgcaggattatttcgggatgaatcttaaatttctcggaccgatcactccgttgggaggattactgatgatcctgagctgggctttgctgatcttttacttcgtgaaaatgaaagcgtaaaaataaaaaaacttcagtttgagataaaatttaatgaatcgcaaggttaaacaaaaggtttaattcttcatttttcagatatttaagttaaacgaaggcgtaaaacttatcaaagaaatacaaactctgtatttcattactaaacgaaatgcctttgtttttcttaaaataattcccaaaaaatgatacttctttgtattcatttgcggcaaattaataaacacaatcaatcaaaaacatagaaatcattttatcttaaaataaaataaaaaaggaattctgcggtcagaattccttttttaattatctcaaaaagttctcattcagccatttcagcttgttgtagcttttcaggaatttggctttcagttcaatgtttttttctctcgcatccaataatttattttctctggaattgatcaggaacaaagaactttccccattgctgaacctcgtttcttccgcattcagaagtctttggtaattattcagattcttggtggaaatatcaatctgggtgaaataattattcacttcatttttataggtttcaattttcgtactcagttcacgagttttaagctgagaatcctgctggttttgagaaatctttagtttggcaatttcataatctgctcttgcctgtctctgaaatatgggaatctccagtttcagtccgtactgaaaattattatcaaacaaaggcagaaaatcggcacggtaattttctttattgaaaaaattatacgtaaaatccagtttcggaaggaagctttgccatttcagtcttttttcactttcgaggatattctgcttctgaaaataatattccagcgaagcgtgattctgaagctgtttcgattctaaattttgcaccagaaattcataatcgctatatccggaatgttcgtcaagactcgaagatgggaaaataatctttgaaatttcataaaactcctgattttctttccagagatacatctgaagttcctgcgtacttttcacaaaacttaaataagcatctctttcctgaagctcaaaactctgcagttgcgaagaggcttctactgtatcaattgccggtctttccccgaattcatacgtttttttggtaagattaagcctttttcggttaatttctaccgcagatttctgcaatttgtagatttcatagtttttaacccattcccaatacgtattttcggcatccagaagaagctcgttggtaagaacagtctgttcggcttccgtcattttcaatccgaattttgcctgatccagcatggctcgtcttttatcatacagaagattttttgccaaaggaatcgtaaatccgaattggtataaacctccttttgtttcgctgctgttcagtttttcgccatccagataattgtaacttccggtaatatcaattccgtaccacgtcggaatgccgagttctacatttcgctgttcgtaatattttgttccgtcaatatttttctcccccagttttcctgcaagtaccggatcaaaatttcctctcgccttggtaatttcagcattggcaattttattctgaagctgatatttaaaagctaacggatgataattttttacaatattcagaaattcctgatgcgaaagttttagagaatcctgcgcaaaggaaaactgaacacacaacagaataagaagcgctgaaaatttattctttaatttactgtgaccaataaaggcttcgacaagctcagcctgacagcgtttaaataaatcagttagtttcagaaatgtcatcctgagcttgtcgaaggatcggttgactaaacttcctttactattattgatttctgaatattgcctgtaacgataagtcagattattttttagccttttcatcttttgcagatttttcggtttttacttcataataatccggcgggaatccgttgatgtttcgccacagttcgtaccagatcggaacgtcattaagaatcgcaattccctgaactccggttcccattttaattttcggaggccattgtttttcatttttatcctgaatcaccaaagctttgaacattccgttggcgctgatgttgttttctaccgcaattacttttcctgcaaaggttccatagctggaattcggccaacctgaaaagacaatcgccggaaaaccatcgaaaatacacattacacgttgtccttcttttaccagaggcaaatcgacaggtttaatataaatttctacggcataatctactttttccggaacaatgattccgatgctttcaccatctttgaggatttccccgattccggctttattgatctgtacaacctgtccgtcctgagaagcgatcacaaaatacaaaccctgtcttgcacggtaattcgcaacctgattttcaagtttggcaatatcaccatcgcttccctcgatctgtcccatactttggaaacgttctccttccgttttgctcagtttctcattataatcttgaatggtagcattctgttcgatgtttacattcacgatttcctgtcgggtttgcgccagtttattttcggttgccgtttttttggctaaagcattttgataagatacacttctctgctgaaattgggtgagcgaaaccaaaccttcatcatacattttcttctgtctttcgtactggtcggaactcattctcagctcgttttttgctgcttccagttcggcttcttctccggctaatttattattgagctgactgattttcactttaagctgactcaattttaaatctctggcggaatttaaagcctgcaactggctattggtggttccaactttggcttcgtaatagtctctaacgccttttttggcttctacctgcatttcggttcttttcaccaaaagcggatccagataatcttcttttacttcggaaagctgaagaagcgtatcgcctttttttacataatccccgtttttcacataccatttgataattcttccgggaatcggcgaatttagttgttgtggacgctgttcctgataaagcgtactcacatttcccattaccttgatattctgtgtccacggtaaaaacagagtgataattccgccaatcaggatgaaaagaaaccatcttttaacccttgattttctgtggatgtggtatattttattgactgactgcagttccatctcttttagtttttgttaaataattttttcacatttccgtcttctacctgaagatgctgatcggcttccagaataagatttttgtcttctgaaacaataataatggtggttttagcttttagttttaaaagatattccatcatttttgctttaaattcatcattcattccgtctaacggatcttcaaggattaataatcttctttcccctgccaaagctctcaggagaaggattttctttttggagctgaacgaaatttccgtgtcggtttcgctaatgttggtaaagaatccgttgctgaactggctggagaaatcttcgatgcctatttcttcggcaatttccagaatctgttctgcggaggtttcatgctgcccgagaataatattttcgtaaaccgttcctttgatgatcgtcatgtcttccaggtacatcccgatctggcttcttagcgatactttatcaatattttttaaaggaattttatcaaataaaatacttccggaagtgggatcataaaatccggtcatcatattcagcagtaaagattttcctgcgccgagctgccctgaaatgacagttaaactattttcaggaatcttaaaattgatgttttccagaatcttgtgatgatcgttgaaagcaaaatttacgtctttaaattcaacttcaaaaccgtcattattctgatcgaaggtaatttccccgaatttttcttcctgaagcgtggttactttattcagttttgccaaagctgcaatcacgtcatagtagctttccagactgatgataagcttttccacagccgccataatgctcagaacaacgatttccgtcgcgataaacgctccgatgttaagctgctgattcaccaaaagataggttccgataacgagcatcaccaaagtaatgatgactttaaaagcgataatggttttgtactggaaaaccagaacgcggaagtgtgaggttcggtcgtcgaggtattttaccactctttcatccgttcctgaaagatgtgctcctgtttttgaattcagcttaaatgttttgatagatgcggcaatatcttcaatccacgaagctacttcatattttttgtcgctttcttcaatgctggatttaattccgctttccatcgtgaatctgaaaataatgaccacacagatcaccaccaaagctccgaacaccaaaaaccacggatggtaaaaggaaagaagaaggattccgaataaaatctggatgagcgcggttggaatttccagtaagattttagaaatacctttctgaagattctgggtatcgaaaaaacgattaaccagttcgggaagataatattttcgtgtcgctgaaagattcactttcggaagtttttcggcaaaagcaagggaaaattcaacaaaaattttctgctgaatcttttcaatgatctgcattactttcagcctgaaatagccgacaagccaggttcccagaactacaaaagcgatcagaatataaatagaagttgccatcgtagctcccattacaaaactgacgatagactgtattcccagcggaacacttaactgaacaagaccattcagaatggcgtaaaaataaatgttggtaacatctttcttttccttggtgacgtatttgaaaagattgtaaccgtgctgtttaggagaagtttccatttgtgttttattattttattaggttaaaggtgataaaacgcagataatccaaaacatattttttatgatctattctgtcgatatgattgtcggtaagtttcggaaggtgttcgctgaaaaactgctgatcgtgagcggtttccagtaaggtactcgcaagtgatttcggataaggaaaatctgtttttgcttctgcaatgatttctccgataaatgcacagagactttttaacgggctgaaaaccatttctttattgatttcgtccacttcttttaccagatacgctttgctgctttctgcaataacgatgttgtgaagttttgtaagatcgtaatcttctattttatcatcggtttcatcgttatgcgtaatgatttcgaggatcttttccattttttgctgaggttctttaatttcctgaagcctcagtttggaaatgaattcaatgtaagaccaataccaattgagaatataggtaagaagtttatgttttgaagaaaaataccggtaaaccgttgcctctgttgagttgatcttttgggctaattttttaaaagtaaaactttcaaaaccggtctcataaatcagttctattgaatttttgacaatagcgcgtccgatctcgctgttttcggggtctttaagataaagatgttcgttgactttaaattttacctgaaattccatgatgtattaaataactatattttttgatagcaaaatatataccgaaaaatgttttattattatttataatagcaatactattattttgaattttctatgaataatgttccaatataaaaagactgtttttttaagctaaaaattatctttgtgataaattataaaagatgtacagatttttgctaattgttgcggtatcattattttcaatagttcaggcacagattccgaaagtgaacggcggaaagattgaaagaatatcagattttaaatctcagtttgtaacaccgagaaacatcgatatatggcttcctgaaaattattcaacatctaaaaaatatgctgttctgtatacgcaggacggacaaatgctttacgatcctgatcttacgtggaacaaacaatcctggaatgtggatgaaactgtttctgaactgatgaaatcccaaaaaattcagaataccattgttgtaggagtgtggaacgattccaagatgaggcattttgattattttccgcaaaaaccttttgaaagtttatccactgtggaaaaagataccgttaatcatcaattgaaaaaagcaggaagagccaatgaaaagttttctcccaattcagacaattatttaaagtttttggtgaaggaactgaaacctttgattgataaaaaatattcaacctttaaagacatatctcatacttttattgcaggaagcagcatgggcggattgatttcaatgtatgccatctgcgaatatcctcagatttttggcggagcagcctgtctttctacgcactggaccggaacttttaccaatgaaaataatccttttccggagtctgccttacgctatttagataaaaatttaccagattctaaaactcataaaatctattttgactgtggagatcagactctggatgcactgtatcctgaaattcagaaaaaagcagatgcaattatcagaaagcacggttattcagaaaaaaactggaaaacgttatactttccaggtgaaaatcacagcgaggaagcatgggcaaaaagactttcgaagcctttggagtttcttttgaatagataatcaacataaaagaatcgtttagatttcttattttttgcgtgcttaaagactattttccttacctagacaattatcttcagatattcaaagtgagaaaaatggtgaataataggcagatttaatagatatgttaaaaatcaagtccgtcgtggtttaaattttaagtcaataaacttgaacttccgtgtctttttattaaatttgtcaacctttaactattaaaataaaataataaaaataatatgaatcttcacgagtatcaatcaaaagagattttatcaaagtatggagtagctatccaacgtggtttcgttgcaaacaacgtagatgaagctgtagctgctgctgaaaaactaactgctgaaacaggcgcacagggatgggttgtaaaagctcaaatccacgcaggtggccgtggtaaagggggtggtgtaaagttctctccaaacatggataaacttaaagaaaacgctcagaacatcatcggaatgcagttggtaactccacaaacttctgctgaaggtaaaaaagtaaattctgttttggttgcagaggatgtatattatccgggagaaacggaaactaaagaattttatgtttctattcttttagacagagctgaaggtaaaaatacaatcgtatattctactgaaggtgggatggatattgagcacgttgctgaagtaacacctcatttgatccacaaagaaatcattgatcctgctttaggtcttcagggattccaggctagaaaaattgctttcaacttaggtcttgaagggaatgctttcaaagaattcgtgaaattcatcggttctttgtacaatgcgtatacaggaattgatgcttctcttttcgaaatcaaccctgtgttgaaaacttctgataacaaaattatcgcagtagatgctaaagtaactttggatgacaactcattgttccgtcacaaagatttagctgagcttagagatacaagagaagaagatccgatggatgtagaagctggtgaagcgggtcttaacttcgtaaaattagacggtaacgttgcttgtatggtaaacggagcaggtcttgcaatggcaacaatggatatcatcaagttatcaggtggtaaccctgcaaacttccttgacgtaggtggtactgcagatgcacagagagtacagactgctttcggaatcattttgagagatccgaacgtaaaagcaatcttaatcaacatcttcggaggtatcgtaagatgtgacagagttgctcagggagttgtagacgcttacaaagcaatgggcagccttcctgttccgttgatcgtaagattacagggaactaacgcagttgaagctaaaaaattaattgacgagtctggtcttccggttcactctgcaattactttggaagaagctgcaaacaaagtaaaagaagttttagcataagactgaaatttttaaaatacataaaaaccgtttcattttttggaacggtttttcttttttcatcaaattaaatatcttttgtaatttgtagctgaaaaaacttaatatgctatgaaaaacatacaaattccgaacccgtgttcagaaaactgggaaacgatgtctccgcaggaaaaaggacgattttgttccgtctgcaataaatgtgtaattgattttacacagaaacaacccaaggaaattctacaaatcattgatgaaaagcaagatgtagaaatctgcggaagattttatgatcatcagttaaataccgataataaatctgaaaaggtaagaactcaattctttaaatatattcctgttcattttcaaaatagcagaattgtattaaccgttctttctgttattttatttttaaccggctgctcaaaaccgaaggaagaacctttcgtaacgacaggtcttgtgatgattgaagaagattctatccctgaaaataaaaattacgtcatcggcgaggctaaaataaatgaaagcgattcctgtgtaaaaatctctgaaaaagacagtattattaccaaagatgtatcttttaagaaataaacaatttaatgtaaagaaagtgatataattaaataagttattcattataaaatcattatctttacaagaaaggtttaaaatgagattgtatttattctcttttctttttttatttcttacttgtcaatctcaaattgccagcaataacgcggtgtctcaaagaaaagaaattcagttcgaagataaaaatcattatcctttcccgttaatccggaaagattttctccttatcaattcccagcaaaagatggatgagatttttacgattattcaccggaaaaatgtggggaacagattttcgccaattccttccatcacagaagatgaaacgtatattattgtaaaacccagcctgaaaaactctaatgatgtttcaattgatacggttactttctctaaaaatacactctatataaaagtcaaagaattcaacaatccggattttaatgagaaaagcagaattccgcccgatattttattaaaactcaataaaaatttgcttattaaaaaagtaaccattcaatactaatatataaaatgactgtcatgaaagctaaaatctttatcgtctcgtgcctgttgattgtatcggcacaggtttttggtcagcagaactactggtcaaaaataaaagaaataaaaatagaacgggaaaatctcaatccgagatggacaactcccaataattttgcactttatcagactgatcttgaaaaaattaaagctgatcttaaaaaagcaccccagcgtttttcgggagatgaaagccttgtgattaaatttccggattctgatggtaaaataagagattacatcgttcaggaagcatccgtaatggaacctgaactgcaggctaaattcccggaaatccgttcctatacaggttggcaaaaaaatcatcccgaaaactcgatccgtttcagtgtgacgccttctaccggaatcagtgtgatgtattttgataactgggaagtaagttatctcgacagttacacaaatgacaattcagcatttattttatacaaaagaaaagaccttccgaaaaatgacagactttttgaatgtcatattgaaaacgagctggataacttaaaaaataacggtacggtgaataaagctcctctggtttcggacggacagttcagaaaatacagactggctctttctgcgacaggagaatataccacttttcatggcggaacacttgctctggcaatggcagcaatggcaactacaatgaccagagtaaacggaatttatgaaaaaacgatttcgacaaccatgatgatgattgcgaacaataatcttttggtttacaccaacgcagcaacagatccttttaccaatggcaatccaagcagcatgattaacgaaaaccagaccaatacaacggcggttatcggatctgcaaactacgatatcggtcacgttttcggaacaaacagtggcggtttggcaggattgggagtagtttgtgtttccagcagcaaagcaagaggcgttacaggttcgggagctccgattggagatccttttgatattgattatgttgcgcacgaaatagggcatcagtttggagccaaccacaccttcagagcggcaacttcttcatgcgcagggaacttcaataactcaacagcttacgaaccgggaagcggatctacgattatggcttatgcgggaatttgcggagctaccaataatgtgcagaataatagtgatgcttactttcatgcggcaagtgttctggaaatgtatgctgttcttcaaagatcaacagattgcgctgtaaaaaccaacaataataacggagttcctaccgcagatgcaggagccgattataatattccgaaaagtaccgcttttgttttaacgggaacgggaacagatccgaacggagatgctttaacttacctttgggaacaatatgataatacaagcaacacacagcctccggtttccactgcaacagcagggccggtttaccgttctttaactccaacggtttccccgtccagatattttccggtgctgagttccgttgtggcgaataatcttattccgaaatgggaagttaccccaagtgttgccagaacgatgaatttttctcttttggtgaatgataataaggcaacaggaaatcaggcagcaagagatgtaatggtggtaacagttactgacgacggacctttcacggtaacttcacaggcaacaacaggaacaaactataacggaaatacatctgttccggtaacatggaatgttgcaggaaccaatacaggaaccatcaacactcagaatgtatctattttgctgtctaaagacggaggattaacgttccctactgttttggcagcaagtgttccgaacaatggttcagccaatgttacgttgcctaatgaaaatgtttcgtctgcaagaattatggtgaaagcggtaggaaatatttactatgcacttaatacaacaagtttctcaattactcaggttgttctcgcaacggcagaagccaatgtgaaaaacttctcgatttatccgaatccttctcaggatgttgtaaatatcaggcttaaaaattcttctcagaaagcagattatactttgtatgatgcatcaggaagattaattaaagaaggcagtttcaaaggtgaaactcaggtaaaagttaatgatctgatgaatggaaattatctgatttctctggttttggaaaatggagaaaaaatcacagaaaaattaatcatcaaaaaataaattactgattcataaaaacagaaaagcaaccactattcggttgctttttttatttagtcctgattttcgttgattagatgatctccgttcgtaatattgatgcttgtaggcgttacaagctgaactccgtccttgtcaaggcgctgtttgatcttcaaataggcctcacttttaagctgaaccatattcgcacccaccttcatccagaatttagcctgaatattaaaaacgccctgtttcaaatctgtaaaaataacttcagcagtatccagtttatctacattttccagatttttgataatttccagcattcctctttgagcttttgaaatatcttcatcggcaggaatttcgaaatttaaaataattcttcgctgaggggatgcggtaatattgtaaaacggagcattaaaaaccacctgattcgggatataagctttcttaccgtcgtccgtaatgattttcgttgttaaaaaaccaatttcctgtaccgttccggagtgcgttcctatcgtaatataatctccgactttaaatgctttatcaattccgatcagcattccagagaatatactggaaaccagatctttcagggcaacccctgcaataacccctgcaactcccaaactcccgatgaatttccaaaggaaactgctgaagcccataatttccagcgcaataaacgttcccatcaccatgatcaagaacctgaaaacgctgattaaggttaccaaagaactttcttttttgctttttggaaagaatttatgaaaaagttttacggctccctgacttaaatatttactggtaaacagaaagaaagaaaataccagaatccctacaataagttttggagtaatttctgcaaattttacataccagttctgtattacattatatacaacatcaatatagcctaaaccacttttctccatgaataaaaatttttttgattaaagatataatttttcaacaaaaattttgccagttccaaaaactctactaaatttgtagactaataagagcaaaatattatgtcaattaaactaggagacaccgcacccgattttcaggcagaaacttctgcaggggatattaatttttacgaatatttaggaaattcctggggaattctgttttcgcatcccgcagattatactccggtttgcaccacagaacttggatatacttcaaaactgaaagaagaatttgataaaagaggaaccaaagtaattgccctgagtgtggatggagtagaagatcaccaaaactggattaaggatattaatgaaacgcagaatacggaagttcagtttccgattattgcagacaaggacagaaagatttctgaattgtatgattttattcatccaaatgcttctgcaacagcaaccgttcgttctttattaattatcgatccggaaaagaaagtaaggcttattattacttatcctgcttccacaggaagaaattttaatgaaattctgagggttttggattctcttcaactggtagattctcataaaatcgcgactcctgttaactggaaagacggagatgacgttattgttccgccttcaatctctacggaagatgccagaaaaattttcccgaaaggagtgaaagaaataaagccgtatctgagatatacgccacaaccgaatacatgatttatttgattttttatagtttagttttaatttgtacgaaaatcgcctcgaaaaacttcgaggcgatttcaattgtagtgtatatgtgaatgtgaagtgattggatcgtaatcttactttacatcatttgcgatttgttttgctttagatgtaggaaggtagatgctgaaacctaaattgaatgtaatattcgaatttaaaccttcgctaccaaatcctgctcttcctctgtattttactaaaccttcaagaccgatatttggggtaatgaagtaagaataaccaggacctactccgaaatcgaaacctgttgtagagtctgcattttctacagatcttcctccgatccctgcatttccttctaagaaccaacgtccgtggtttagtaagttatctactcctttttctcccggagaaagaaaataacgtcctaaagcaccaactccatacgtaaattctgtaggagaaccattagttaccttgttgaatcctaaatctacataaccaccgacagctacgttgtcttcaatgaagtatgctcctttaggctgaatagcaatgttataaccgccaccagtatttaaaccgaaattacttgatattaaactactaccaactaaccagtttcctttctggatttgtgcatttattgttccagccaaaccagctactgccattattcctgtaaaaattagctttttcataatttattattttaatattttaatgtttatatcatttgtgatttcagaaaatcaataaatgtgccattctaatcaataggtagtgaaatcatgataataacaaataaggtataactcttatgaaatgccgatggaaaggagctttttttagctttaaaattatactaaaagcaaaataatcgatactacaagacctgcaacggtgaaaaccattcctcttttgaaagctttgcttttagcattaaacatccagaaacttgagattacaaaaaagaataaagaaaatccgaaaaaagcatttaaaggagaaagcctgtctttagactgcgatttatgaagtttcgtcattttatccagtacaaatggcagttctttcttcgtgtattttgcctgtcctgttgcagcatcataagttccctgtttaaattttaaaactgttccttctgttttttcaacctcaagacctttaattctcaattcttttcctaatgctttttcatcaagatttttttctacgactttatcgtactttttttcttttttcagaaaatcggtgtctctgtaaattaacaaaacaccacttactgcgtaaacagccattattccggcaaggaaatagcccagataacggtgcgtgattctcataaaacttcttgtgtctttaatcttatccatatatattgtttttgtttttaaaatttcaaaagtggaaactgcaaaattgcaattcccactttacatgaagaaattattgtgattcttttttacagcttatacgttaatgtaacatagtagtttctcggcgtaatcgggttcacggaataattttcgtgaacagtgtaattctctacatcaaacaggtttccgactttcccctgaatagagaatttcttccagtcatatcctgctgataaagaaaccgtagtataatcttttaattcgaaaattctgcttaccccgtttctctgctgcaaactgttagctcctgttttggtatcattccatccggcaagtctgtctccgatgtagtatactccggctcccactttcaagcccggaacgaattttgtgaatttataaaataccgaagcattcgcagtagttgcaggagttcttaccagtctttggttttctacatatccgaaagcttccggagtatccagatacacagaattgttataagagaaacctccgataatggataagttttctgttggatttcctgtaatatcaagctcaactccacggcttctcatttttcctgcaaaatctttggtaagtcctgtcggatctaccggatttcctttatcatccaatgcattctgataataatttctgtataaaatctggtaaaccgttagattaaccgccaaagcattgttccagaaattctttttcgcacccacttcatactgatcgatgttggttggagttaaagcctctccgtctcttaatcttcccacattggcaacaaaagagtttgtataggttgcaaatgctgaaaaattatcgtttggcatataaacaaaacctaatttcggagatattgcctgatcggatgacgatgaattattaaccagtgattttcctgtggtagaattcagatttactaaaccacttgtaaccgttttaaattttgtgttgatcgtaggcatattttcaatgtaagaccatcgtaaacctgcaataactttaaattctttggttaaactgatgaaatcctgagcatacactccgattcttcttgtattaattctgtttttctccaacatttccgcagccggaatacttccgcttgcccacgattcaggattgtccagataaagaataccattgctgtttccgttggttccatacagatagctgtttccgtaagccagtctgttggtaggattatagtaagtataagaatctccaactccataatctgcatctgccccgaataaaactttatggtttatttttcctgtattgaattcaccatttaaatttacctgtgccgaagtataattctgttcgttatacgttctgttcaaaggtcttttccagaaaagcctgtcagttgatttttcgtatccccactgaactctttccgtagaaaaataatctttcgtgtaattctggtaagatgccgtagcgtttaaagaccatctttcattaaactgatgattgaaggtaacattggtagtaacctgctctacattctgatattgccagtcagctcctaaaaaagcatttctcggaagaagattattcatctggtaagtatatccgtcacgctgcgtgatggaaccaattccgaaatccggagtaaaatcatttttaagataatctgcctcaacgatgatctgtgatctgtcgcttaaattaaataaaaacgaaggattaaaataatacttttcagactgtaccacatctctgaaactttctgcatattcatacgctccgttcacacggaaagcaatattttttgaaagcggaccataaagatctactgtcggtttataagaattccaacttcccgcattcatccccacgcttccgccaaagttgaatttaggctttttagtaatcatattaataacaccacctgcagccgtatttccatacagcattgcattcgcacctttaagaacttccactctttccagtccgctgacttccgggaaaacgccgctgttaactcgggaaccgttcttgaaaatattatcatttcccagaatgaaaccacgtcctccgaaactgtcctgagaatttcctctggaagaagttacatagattccgttaacgttctgcagaacatcgctcagttgttttgcctgttgctgctcaataatttcgtgagtaacaatcgcaatcggctgaggagtttccatcatcgtaagattagacttggtagataatggtcttgccttgttgggatttccggttttatgaagattaacgtcttcaatagtctggattctaatggtatcagcttcaacatatttcatctgcgcgtccaaagaaagggctgcgaatactaatcctattgtggctagctgctttttcatgatagtctattattatttagagtggttttaaataaagtgcaaatgtatattattatttagaattaataaaaattataaactgatttttatcattaatctttaatttagaaattgtgttttcccttattttagtagggatgagaactttagattaaatatctttgttaaaaaataaatctatgcagttagtaaaagtcggactttgtgcgttcggaatgagcggaaaagtttttcatgccccgtttttgaaagaacatccgggattttttatttccgctattgtggaaagaaataaagaagaatctaaagaaaaatatcctgaagcagaaatttaccgttccgtagaagaaatgctggaaaatgccgatatcgaactcgtggttgtgaatactccggtacagatacattttgaatatgcaaaaatggcactagaagcaggaaaaaatgtagtagttgaaaaacctttcaccgtaaatgttgcagaagcagaagaactggcaaaactggtggaagagaaaaaattatttgtaagcgtttaccaaaacagaagattcgaccgcgattatcttcaggtacagaaaatcatcaacgaaggaaaactgggaaatatcaaggaggtggaaatccgtttcgacagattccgtaccgaaccaagcggaaaagcacataaagaaaatcctgaagctataggttcgggttctctgcatgatttgggatcgcatctggtggatcaggctgttcagtattttgggtttcccgaaaaactgtttgccgatgttttttctatgaaaggaaaagaatttgccaacgattattttgaaattattttgttttatccaaatgatttaagagtaaggctgaaatcttcggtattcaccaaagaagcgcattttgcttatgccgttcacggagaaaaaggaagctttttgcaggaaagaaccgataatcaggaaaatgaactcgttgcaggagctgttccggaatatggcgaagaatggacaaaacctttaacggaaaccgacgggattctgaattatctaaatgaaaataaagaaactgaaagaatcctcacttcaagcgaaccgggaaattacatgaattattaccagcagatttatgagtttatcgttttcggatacgcattgccttcacctgcggaagaaatcatcaaaaatatgaaaatcatcgatgcggctgaagaaagtgcaaaacaggaaaaagtgatttacttgtagagtctttatggtgagagagttgtagagtttgagggtcttagtgtgtgagagttgtagagttttagggtttgggagttttattgcagtttagagttatgactcttaaagcaggatttttagagtaaaaaaaattacatcaataaaatataacgcttccacactctaaaacactgtcaccctcaaacacactcaccctaaaactttcaaactctcacacactaagaccctcaaactcaactacgcttcacccaagatctcctgaagttcaagccatctcatctcatggttttccaaagtttcagagatagattccagatcggcagaaagtttggatattttctcgtaatctgcttcattattaagctgatctaatatttttgttcgtttttcctctagttcaggcatttccttctcaatggtttcgagttcacgctgttctttaaaggaaagtcttttcttcttagtgtttgtattgttcgcagcaggaactgtttcttttacaggctcagattttacggaaacagacttttccaaagcatcctccttgcttttcgcttcgcggtattcggagaaattacctgtaaaatcacggattttaccttcgccttcaaaagcaagaatatgatctacgattctgtccataaaatacctgtcgtgcgacacaatgattaatgaaccctgaaactgctgtaaaaagttttcaagaaccgttaaagtcggaagatcaagatcattcgtaggctcatcaaaaattaaaaagttcggattctggtataaaatatacatcagatgaagtcttcttttttcaccacccgaaagcttggaaataggggagtactgtgtctgatcgtcaaataaaaacaatcttaaaaactgggaggcagaaagactttttccgttggctaaagggtaaaattcagcaacttctttaatgaagtcgattactctttcatcttctttataagtaagacccttttgcgagaaatatccgaaatggatggtttctccggtttcaatctctcctttatccgctttttcaaacccctgaataatatttaacaaagtagattttcccgctccgttttttccaacaattcctactttttcacctctctggaaagaatagctgaaatctttcagcaacactttgcttccgaaacttttatcaatatttttaagctcaagaattttatttccgagccttttcatttcaaaatcaagctctaatccctgttttctcgtgtctgttttggctactttttccgtttcgtagaaagcatcaattctggatttggattttgtagttcttgctttcggctgccttctcatccattccagttcctttcggtaaaggttgttggctttatcaattgtagcattcgtgttgtcctcgcgaatcatcttattttcaagatacgtcgcgtaagaaccgttatgaacgtaaagattcctatcttccatttcccagatcgtatcgcatacactgtcgaggaaataccggtcgtgcgttaccagtaataaagtaatttttgccttactcagataactttccagccattccaccatttcaacgtcgaggtggttggtcggctcatccataattaataaagtatgacggtgttcggctcttgtttccgttaacagttttgccaaagcaacacgtttgatctgtccaccggaaagtgttcccattttagcttccagatcggtgatttttagctgtgaaagaatctgcttcatttcgttttccagatcccatgctttatgcgcttccatttcaagaagggctttttcaataaaatcattgtctgtggaatgcagagactgatgataatttttcagagccataatcggagccgaatccagagtcatcataaactcatcaatcgtaatggtcgggtcaaaatctatttcctgatcaaacagaaccacctgaatgtctttattgatgattaccgttccgctgtctgcaatttcttttcccatcaggattttcagaagggtagattttccgcttccgtttttggcaacaatggcaattttatctccttcgtttacatgaaaagtaatattttcaaataaaacttttattccgtaggatttggtaagattttcggcagaaacgtaattcattatagtttgatggttagattttgaaacttaaactgagcggcaaaagtacgaaaatgtatcagaaaaagcagaaatacaatcccgaagccttacacagttttttttcaatgttaaaaaaataatgaattgtcttatgtattgaattgtatttatctttgtttttgtttgattgtaaaattttagttaaaattaaatatttattaaatttaatgtattatttaatagatttttgatgtagatttatattcctaacattattaaaattaaaactatgatgcaaatcaactactgggctgtttttgcagccgcacttgtccctttaataatgggatttatctggtatcatcctaaagttttcggaaaagcatggatgaaagaagtcggtttaaccgaagagaaaatgaagggttccatgatcggagtttttattttttccatcatgttatcagcattaatggctttgttcttacaatttgtaaccattcatcagtttggcgcgctcggaatggtcggtggagatgaaatgaatgccaatccgtcttatcatgccttcatgaaagactacggaatggcttacagatcctttggtcacggcgcactgcattcttccatgacgggatttttattcgtgcttcccatgattgccatcaatgcgatgtttgaaagaaaatcgtggaaatatacaataattaacgctgctttttggacgttctgcattaccattatgggtggaattatctgcggttggtatgctccggacggttttcactgggcaacacaaaaataaatgtaatgttttaaaaagttaaggctacttttgtgtagccttttttatgtcatatactttaagaatttttcagtcagttgccgatttgccggaagactggagtgttgtgatcggaaatcacaatatcctgctttccggagaatattttcgtgcattagaaaattccagaccgcaaaacatggaatgcttctttgtcggttttttcaaagaaaatgaactgattggcggtgctttgtttcagtatctcagttttctgcagcataagacctttcagaacaatgcaatattctgcagcatcagaaactttgttgcaaaaaagttcagtagagatgtgataattttgggaaataatatgcttacaggacagaacggattttattttgatgcttcaaaaattacttccgaagaagtgcttccgcttctggaagaagccgtttatacaatgcagaaggaaataagaaaaacatccttaattatatataaagattaccagtcgaattttgtgaaatactttgaaggagaaaagcatcggaaatatttcagattttccattcagcccaacatgattttaaaaatacgtgaaaactggaagagttttgaggattatgtaaatgatttctcaaaaaaatacagagcaagagctaaaacagccaaaaagaaactggaaggaaccgttaagaaagaattcaacttagacatgatcagaaaatataagtctgaaatgaatgttctttatcagaatgtggcagaaaatgcccctttcaataccttttttctcagagaaaatcattttgaaaggatgcaagaaaatcttggagacaatttcaggcttttcggatatttttcgaatgaaaaactgattggtttttataccatgatcctcaataataaagatatcgatacctactttttaggctacgaaaaagactgtcagaaacaaaagcagatctatctcaatatgctttttgatatggtagaattcgggatagataaacaatttgaaaggattattttcggaagaacagctttagagatcaaatcaacgatcggagcagagccgactgaaatttttggtttaattaagcataataatttcatgattaatcctttcctgaaaactatttttccttccatttctccaaaaacagaatggattcaaagaaagccgtttaactagtttgtacagaattcacacaggttttagtttgatattttcatcaataggaacgggcttcagcccgttaacaatataaggtttttcgattggcttcagccaaagtctcacatgtttaaaatttgcaaaatcaccggaaaaaatcaatccaaagtcagcctcttcaaagaccacgaacttccgttgtaaatatccagatctacttttgtattaattccgtgcacgattccgttttctgtaaactgccagaaatcccagtctgcatcgggtgagggagccggaacatcattgtaattagctagccagagcggataatcatcaaattcgcccttcaggaaatctttgtaataatgataatacgtataaataatgggtttttcgccgtaagtttcctctacaattttgcaccacactttaaggtcttcaaccagttttttattcgttttgcgcttcggaattttctcaatatccaaaatcggaggaagatcaccgctttcgagctttacattttccaggaaattatttgcctgaatcacagggtcttcatctgctctgtaaaaatgataggctccgcggattaaattctgtttttttgcctgttcccagaaatctgaaaaatgtttgtcggcatttcggtttcccatcgttgcacgcatcaccacaaactccagcggaatagttttgtttccgatagtaaggctgtcccatttaatgtcttctttattctgataatgcgaaatatcaaacccgtaagttttatctaaattattagaaaggattttctgaattctcagcgtttccgtttcactgttgtggagttttctatgagtaaatttattgaaatataaagcgtaataataacttatggattgtcttaaatacaaccctgttccgataagagcaacaattaaaatagccagtacgatttttctgcggaaaagatattttttccggcggttctgatggatctttttggcggtttttttgctgtacatcgtttgtgaataaagatttacaaaactagcttttttcacttctaaatgctaaataaaatcagtaaatttgtgtactatggaaacacgcgaaaagatcatcatcattggaggaggttttgcggggctgcagcttgcgaaaacgttgaataacaagaacaaaaaggttattgttctggatcgggtaaaccatcatatgtttcagccgcttttctatcaggtcgcatgcggaaggatagaaccttccaatatttcttttcctttcagaaaaatttttcagcgttccagaaatacccaatttcgtttaacggaggttaaggaaatcgataccgcaaataataaagtcatcaccgacgaagcggaatttacctacgataaactcatcatcgcaacaggatgtaaaaccaatttttttggcaataatgatcttgcagggaaagctttcggaatgaaaaatactcaggaagcaatcagtatccggaatcatgttttaatgactttcgaaaagctgattctagaaaagagccgaagcgacgacggaaactggaacatcgtaatcgtaggaagcggaccgaccggagtagaattagccggagcgttttcggagatgaaaaaagaaattcttccgcgcgattatccttacatgaattttgaccatctgaagattattctggtaagttctacagagaagcctttggcggtaatgagtccggaagctcagcaaaaatctgaagaatatttaaaagatttaggcgttacatttttaagccaggaatacgttacggattatgacggcgataaagtgtatatgaaaagcggaaaaaccattccgtccaataatgtaatctgggcagccggagttacaggaaatgttgtagatggttttcctgccgaaaaattaataaaaaacagatacattacagaccgatacaataaaataaaaggttacgataatgtctttgcaatcggagatattgcgtatatggaaactccgaaatatccgcagggtcatccacaggtggcaaacgtagcaattaatcaggcaaaaaatttaggaaagaatctcttaaagaagaatgcaaatgaatgggtagagtatgagtacgacgacaaaggttctttggcaaccatcggaaaacacagagcggtcgtagatttaccatttgttaaatttcagggatttctggcgtggtatttctggatgtttttacatttaatgcttattttaagtgtaagaaacaagcttgccgtgttcttcaactggatgtggagctattttaacaaagattcttctttaagattgataattttgccaaataagaaaaacgaaacagtacaatgagaattgatataataagcgtacttccggaactgatggaaagtccgtttaaaacttctattttaagaagagcgattgataaaggtttggcagaagttcatttccatcatttaagagagtggggaatcaacaaaaaaaaacagattgatgatgaaccttacggcggcggtgcaggaatggtgatgatggtagaacctttagacaattgtatttcagaattaaaatcccagagagaatacgatgaggtgatttatcttactccggatggagttactctgaaccaaaaaattgccaacacactttccattaaaaataacctgatcttcttatgcggtcattacaaaggtattgatcagcgcgtgagagatctgcatatcacaaaggaaatttcaatcggagattatgttcttaccggcggagaattggcagcctgcgttcttgcagattctgtaatccgactgcttccgggtgttctgaacgacgagcaaagtgctttgacggacagttttcaggacgatcttttatctcctccgatttatacaagaccggaagtttacaaaggtctggaagttcctaaagttttactgagcggaaattttgccaaaattgaagaatggagacatgatgaagcggtaagaattaccacggaaaaacgtcccgatctgctttaaaatagacaaaaacaatcgttttttagaaaccgtcaaattttttaaattttacaacgataattaattgccgttgcgaagaaatggttgaaaatttttcatttacctaactgttcatagaattttttctaccaaaaaatttaattttaaaaacagtttttatttagacttaaaagtgaattttgtgttatggataatatttttaattaaaattgtttatctggtttaaaatattcttttaattgtctatatttgaatgataaaattaattgttgaaatttgttaaaattattaacgatatattaaataaaataataaatttacataatcaattttataaaaggaattgtttgaaatctgaaaagtgtggtaatggagctgtttagtttttacaacgttgaaaatctgtttttaccggatccgaagccgatgcataaattagatcctacaatatcaggacttagaaattgggatgaaagcagatacaggaataaactttccaagattgcacatgttttcaggctaatgaaggaggaaaacggtgttttgccttttatgattggtctttctgaggtttccggaaggaaagttctggaagatcttgtggagatggaacttttcaattcgcaatacggaattgtacactacaattctatggacgagagaagggtagatgtagccttattatatgataaaaataaagtggaagtaatagactcagaaaccattactttcttttttgaaattataaacagaaacacaggaaattacgatacaacaagagacattctttactcgaaagtaagatataaagacgaaattattaatgtttttatcgcgcatcttccctctaaacgcgaaaaagacgttaataaaccaaaaagagactttatcctttccgagattcgggaaagaattcttaagattgtacagaatgataaagaaaacgtattgctgtgtggtgattttaatgaaaacccagatgatgaaaatttagtaaaaattctttttgatgatgcagaaaaaaaagtattggaaaatcctttccagcgtctgttttccacaagaaattattctacttttcattataaatcgggattgctgtatgatcagatcattttatcgaagtctttctttgatgatgaccatggtctgaaatttcaggaggcgaaaatattcaattctgaaaaactcagcagccgcgacagaaaatttgcaggcagaccctacaggacctacgcaggaacgaggtatttgggaggctacagcgatcattttccggtttttataaaattcaggaatttgtaacagacgtaaaaaacataaataaagtagaaagaatgaaaaattcaaacaacacgagttatcagttagattcaatcgataaagaaattatctatatgttaatggataatgcaaaatcctcgttagctcatatttcaaaaaatgtaggaatatctacgacagcagttcatcaaaggattaaaaaacttgaacaggcaggggttattgaaaattcaatttcctttttaaatcctaagaaaatcggctataaagttatttcttacatcggcgtatttctggatcagccaagtcattatcccgacatggtaaaatctcttaaagacattaatgaagtggtggaagcccattacacaacaggaaattataccattttcctgaaagttctttgtaaagataacgaccatcttatgcagattctgagtaagcttcagcaactgaaaggggtgataagaacagaaactttcatatctttggaacagggtatttacagacaactgaaagtataataaattatgaatattgcacaatatctggattcaacatatttgaaaacacctgcacagtcggggctgtcacaggaagaaactttacagaaagatatagaacttacgcaggaagcgatagatcatggtatttttgccgtgatgatccgtcccgattatgtttctgaaattaaaaagtatattcaggaaaagaattcggatgttgtggtaggaacagtcatcggttttcacgaaggaacctattctgtagaggaaaaacttgcggaagccgaaaaagcaattgcagacggagcagatgaactggattttgtgatcaattacagtgcttatactaaaggtgatcttgagcttgtaaagaatgaatttgtacagtgtacaaagctttgtctggaacaccataaaattgcaaaatggatcatcgaaattgccgctttaaacgatgagcaaattgctgatcttaccaaaaacatttccggttgggcagaagaaaacttttctgaaaacgatttgtctaaaattttcgtaaaatcttccactggtttctataagacagaaggaggaaaacctaacggagcaacctttgaaggaattaaaatcatgctggaaaatgccggaaagcttcctgtaaaagccgcaggcggagtaagaacgccggaagatgccgaaaaaatgatcagtcttggtgtaaaaagaataggcacttcatctgcattggcgttaattaaaaaccaatcggcttcggaaggatattaaataaaactaaacagtgaaaataaaaaaccatcaacttactattgatggtttcattttttatgcctgttgcgccaaatattctgtataaaactcctgtgtttctttaatcagcgcatctatttctgctaaagtaaacacttctaaaaatttctttctgaaatctttaaaatgaggaactccacggaaataattgctgtaatgctgtctcatttcaacgagtcccaatctttcacctttccattctgcactccattctgcatgctgacgaaccgcaagtaatcggtcttcgattgtaggagccggcaaatgttcgccggttttaaagaaatgcttgatttcgttaaaaatccacggataaccaatcgctgcacgaccgatcataattccgtcgcacgcatatttctgtttgtattctaacgctttctcaggagagtcgatatcaccgttcccgaaaatcggaatctctatattaggattttgtttaattcttgaaatatgttcccagtcagcttcccctttgtacatctgcgcacgggttctcgcatgaatggttaatgctttgatgcctgtttcctgaagacgttctgccacttcatcaatattaatggaagtactgtcccaacccaaacgcgtttttaccgttacaggaaggcttgtagaacgcactacggctttggtaagacgaaccatcagatcaatatccttcaaaactcctgctcctgcacctttacagaccactttttttacaggacatccgaaattgatatcaaccagatccggatttaccgtttccacaattcttgcagacattgccattgcttcttcgtcacctccaaaaatctgaattccgacaggtctttcgtaatcgaaaatatcaagctttttacggctcttgatggcatcacgaattaacccttccgaagagataaactccgaatacattaaatctgctccgtgcattttgcagagtcttctgaacggcggatcactcacatcttccatcggtgcaagcaaaagcggaaattccggcagttctatattgccaatttttatcatgctgcaaatttacgaatttctgagcatttcagaatttgataatttctattaatgtaattgctgtgaataagcaatataaaaaacgaaaatctcaggtaaattataatactaagcaagaaatctaaaaccctcaaacccttaaactctccgattcaaaaactctccaactcaaaacccctccgactctaaaaactcgccttcacctgcatacttccgatatgaatcgttcggtctccggagtttctgccttcgtagtttaaatttagctgaaggaaagaattgatcgcctgctgaatgaaaacactccaaacctgatttttccccggttttaaaccatccaacatctggtttccgacaatactgaaattattaccgttaaaattattattgatgaatgagaaatttcctctgatggacgtttttctgcgttcccactgaatggttcccgtaacatcaaaagctttgaggaattcttctccatccactctctgtttctggcggaatgccgaagaaagttcagcctgaatggcatcggtaaacttataggttgcttttggtttcgtttcaaaattattcaggcggtaatctcttgtagaaaataactgtgaagaattttgaatatcatgaactgaattttcccagtcgatacggaattctttattaaaccaatagccgatattcaggaaatgcgaaacctgttcccgctcctcattactgaaattcgcattgatgagattgtcattggagatgaaacggtaatttccgttccagccggatttgtcagtcgggctgaactgtgcggaagccagaatattttggtttttaagaatcatgtcatcacttttctcaaaaggattcaaaaccagaactttatcttttttgaagaatgaattttgtgagtttaatgaaatattgaaattccagcgttttaaaaatttattttcagaattaaaaacaatcgacggattcacaaataacgcgagctgaattttatttttgttggacggaatataccgtacagagttggtgtaaattctgatgtactgcgccaaatccgaatattcggcaatttcaaattcatcaagctgctgaacaccgtctccgttgtaatccgtccatttataaattccctgtccgtccgtcactttaatatactgaaactctctttgggcttcctgtccgttcccaagttcatagaacgcctgcaaacgcattccgttcttgaaaagctgctgattataaagaatatttccgacaacgaagtcattgtttctcgaaagatccacatcctgattctgataaaagaactttctgtagtggagtagggcattcagcgttgttttctctgttttaatgatctggctttctgccatcactcccaaaatattattcatattctgaagtcggttatctctcacagaatcattatctcgcatataaacctttgccaaaagtttggttcttgtactgtctccgatttttttctgaacaaaaatttctttccagctaaaactggtaacgtccatcagttgcgtatcattgtacttcttttcgttgtgttccatgcttccgccaatcgcccagcttccttttttaccggtaaactcagtggaaaccccgcctctgatgaatttggtatcctgaagtacagcattggtattcagataggataaatttccttttgtgaaaaatttaccgctgatccacccaaaatccagatcattctttattcctttatatgtttcctgctcatcaagataattgattctgtaatttaatgttgatttattgttccatttgttcaaaaagctgaaaataaatctgttctgcgttcttccgctgaattcctgcgcaaggttgaaatctctggagaattccacatcattaattcggtctaaaatatgaaactgcttgtctatgtattgatattcgaaattcggagttcctttccagttatttttggtgaaggttttgtttccgaaaattctccatgcatatcctatattttgctgagaatcttttgatgaaaataaattgacatcataattgctcaaagatatatcggctcctatttttccgtctttcaataaatattctgagtttacagaatacacctgagatttttccggagaaggaagttttctcacggcacgataatctcccatgttgggaccaacgtaagcgaaaacacgcccgttgttggtggtctgcgtaattttatagtctcctaaattagccccgaaatacgtgtaagaaacgctgtacaatgtttgtgtggcatcggttgaaaactcataataatttcctcccgaactttgaaccagcttatacaaaatcttattgacatcatattctgtcacaactccggaaggagcatacattaaattcggattgtttccggcttctgcaagaatctgctgatcttcctgtgaaagatttaaagaaagcggtgcgtttttattgtcgttttccataaaccagttcagtccgagcttcagtttttcccttttatgctcaacctttccggtaaataaatatctggaataatttctgttggtataattataagatatcgtaatgaaattctgctggaagatcggtcggaaactggtaaaagtaacttctccggtattgtaattgatgatgtagtcctgattttcaccacgcttcatcaagattccgtcgataaaaacctgttcagaacctgaaattaaagtgataaactgctctccattttttcctgtcaatcgataaggtccctgatttccttccactccctgaaaacggattctgtgaaattcacttcgtgcaacccccatcgaaacatccacaaaggttttattttctttcccgaattccgtctgaaattctagtcccatgcttcttcgctgatatttagcgaaataatttttagcttccaccaaatccagatgtcccgctctcaatatcgatttatccttgatattaagctgcatataaattttgtcgaattcctcaagcgtttgtgtatatccatctgcctgaatcgggagattatgatccgaaatacttgcaagaatagtcacatctttcgaaagccttccggaaatctgcaaatccattgaactttgtacagactgtccctgattgttcccaaacgtaatcccgcgaatgatggatcctttggaatttaattcccctaaaaatctttttttatcgtttttagccaaaactccttcatctacaataatgcggttgttagtttttacaaaatccagcgtgtcttttgcgaaaatatcctgctcaaatctggctgcaaggatgctgtcctgcttaagactgtcattcttaagagtgttttgcggaagattgggatttttccatgtaaatacctgagcatttcctgaaaatatgcccacgaacaacaacacgaatatcagaataaaatttcgcaaatctctaaaaataaagcgtaaaaatacttaaaaatactttatggaaagggttttagtattattaacagaaaattaacccaattattgcattactaaaaaaaaatggcgtaattttggcttgtaaattattaataattaaaatttttaaaatcatgaaaaagatttactctctatttgctgcagtattatttactatcacagcttcagcacaaaccactatttatactgaaaatatgggaactccaacaactacaacagctatttccgccaatacctttcagaatggtagtccgatttcttattctggaactgctgatgttagagtaagcagtgcatcttcaggctataccggtgcttctggaggtggaaatatatttttcacaggaacagctgggacaaactttattatcagtggaattaatacgtcgtcttactctaatattcaattgagttttggtcaactaaaaactacaaatgcttctagcaacgaattaacagtagaagtaagttcagatggatcaacatggacaccattaacttatacaagagctactggtagcggaacagctaatacttatatcataattactcctacaggaacaattccttcaacttcaactttaagcattaaatttaccaacacgattacaggaaattggagaattgatgatttaaaattgacaggaacatcaggaactttagccgttacagatctatctaatgcaaaaggtgctaactttgttaaaaatactttcgttaaaaatgatgagattacttttggagctgatgctaaggatatgaaaatttacaatatgttaggacagatcgttaaaactgcttctgtaaaagaaaatgaatctgtaaatgttgctgaattaaaagaagggaactatattgtaactggagttgtaaatggtaaaaaagtttctcagaaaattattaaaagataactttaataatatattaaatatataccaccatttatgttaaatggtggtttttttatacctttgtaaatgtaaattattaataattaaagctttaaatttatgaaaaagatttttactgtcttaatagcactttcagctatgagcttttctgatgctcaaaatcttatatcaaacgggaatcttgaaacttggactgatcctgctgctaaaccagatggatggttcagtatggcaggaggagcaaaagaaacaacttcagttcatggaggtaataattctgcgaaaatttcacctgttgcagtgaatactaacggaaacttagattatattgatgtagcagcaacaggaaatactgattacactgtttcttattgggtgctggataatgatcctaatgccagagcaagacattggatacagttcagaactgcaagcgctaatatctccgttacgggaagttcttttcagccttcgacttatacatctgataacgctaattgggtgaatgttacagcaacggcaacaagtcctgcaactacagaatttttaagacttagtttacgagtttatgctcaaaatagtgttactacaggtgctatttattttgatgatattgttctaagtccttcaggttctttgggaactatgaatcctgaaattcttaaaaacagcgtaaaactttccagtaccttagttaaaaattcttttgatatatatcttacaggaaacgcagaagtgaagattttttcatcttcagggcagatatttgaaagcaaaaaaataagggattttgctacttttgatgcctctcagcttccagttggagttaactttattcagattaatcagaatgggaatattatagtcaagaagattataaagcaataatatttcataatacatcaaaaaaatgtcgctctaatgcgacattttttaataccagcctctcctcgccgcattaataatagaactcagattaagaattaaagtatatcgtattctttttccgtaatctttaaagccgggttcgaaacctaaagaagattgcaccggaagatagatttcaagaaaatcggggatgattctcactttcacaccactgtcccagatgaatttcgtcgattggtttttgttgtcataaactcctgcatctgcatagacgtggaaaattttccatacacttgtatctacgtttactgaagtaatccatttatttacacttccgggaatgaacgatttaaatcctccgtctgccaaaacatattgctgggaaagaattccgcctgttgcgctctggcccagtaagttataagaaaacgagtagtctgaaactctggaaatcccgtaattaaaagtattgtttcttgtattgtttttaataaaatatcctgcaaataaacgtatactcaatttttgtcttggcgcaaattcccatcggtaaaagccttctgcggttactttatgaaaatcttccatccattgtgtacttacgccgagacttttttcgtgaatactctggctgtcgttatatccatatccaacgctccagagattataccggtcatagtcgttattggcaatcatcaacgcattaaggtctctttcaaaatagttataagaaacacctaagcttctgcttaccgtacttctcgggttttttcggaaatttaaatttgaataaatggaagcttttcggtaggcgagatcataatcatagtgaaaataagagcctgaaactccgaaagtaagacttcggatgatgctttcagccggaagaaaagaataggcaatggctcccgaacctgtcagttttcctgttccggtactgtaagtcggagtaatggaatacagaaatttctgatcgaaaaacgactgatttttaaagttaaatccgatcaggaatttatcgtacgtattgctgaaacgtaccctcggattgatgtatatttcattgaactcaggattcggaatatctttaatcagtttaagctttattttccgcatattggaaaagaaacctttcgcgtataaaaagttatccctgtaattgtcttccgggaaaatgtaatcgtcattcagcgttattttataggtatctaaagccggaattgagaattttttttccttttggttttcatccgtttcaacccaatattctgtggtttctccgttttttgatgtcgtctgtaattttaccggaatgtttgcagcagtatttttctggatggttacattcagagaatcgccttctcttttaaattttctcagtctgaaatttaccctgtttttatgttcaagaaattcaggaaggtaagttgttcttttatctttttctgctaattcttttaaaaaatcagcaggatcaatctctttgtcagtatttttagcaataaaatctttcacaagagcttcgaaattttcgtaacccattttgtcggcagaataattgaaaagcgtccctgtttcaaaattactgatcgccatatcgttaaaattactcaggtcagaataattttcatcaattttctgatccagattctgagacatgatgtattgatacgccaaaccgtatctctcaatcagttttacatctgaagcatgaaataatttcaatggttttaccccgaaaattttcgtttcaggtaaatttcccagcaattttgtatctgcgtagaattttttgaggtactgaatttccagataagatttcagtccgtttctgaaccaatgatgatcctgtttatcggtaatggtgatttcatctaaaacttttttggcaacaattccgaaatagtcaagatctgttttttcggcatcggtaaaaagctggaatctgaatttccagaaagcaatatcattatttccgaaaaaatcttctttatttctgaatttatctgaaatgaaaattctttcaggaacagaaccgatcctttctttgatgaattttaaatgtaaaggaagataaaattccagactttctttttcttcaggctttaaattgtaaccgaacttaatttccgtatgaatatcgttcgtattgatattaatagaaggatattcgttttgtgaaatcagaaactcaggatcagaatccagataaccgttgaaagaattgatctgcgtttgtaaaaggttactttctacaaaataattaaccggaagatcaaagtttaccctccagaacgtattgtaacttacggtttcttcgatatcggcataatctcttttagaaatattgtccggatcaaagcgatccggaacaataaagaaatattttaacgctacgttggtatcagaagttccatatcctgtaaatttcttatcaggaagctgaatctgatattgaagctgaagttttactttttctccgggtttcagagtttctttcagggaaaggaaaatattttcctttgaagtttctcctacaggaatttcttcgcctgaatttttaacctgcaaattcagcagcttacccaattcattttttttagcaaaatgaagatcggtatttctgtcttccagttttcggtagaccaaagaagttccgcgcctgttgtaagcggcgacccaattcaaaagcttaatggtgttgagttctttctccgaattgttgaaatacacaatttcttcggttacatcaagcatctttttatcctgagataatttagccccgatataaatactatctttctgtgcagaaacttctgcaacacccaaaaacaaaataagacaaatactgattcttttcaaaattcctgataaagtatcaaatataacttattttgcagagattccgcaaagattttactgctgaactgcttttttttctaaagaatttaaatatgctttccagccttcgcttttataagtctgagctgcctgttctgcattttcagctttataaattcctcttcctacaataatgaaatctgtatgaagcgttttgaaaacgtgttccggagtattgtactgctgtccttttccgtcttctgaatcggctaaatttacacccggcgtgaataataacatttcctcaggaagcgcattctgagatacacctccgataacattcgggtgagatgaagctatttttaaagcttcttcacgatacgcacttgttgttaatgcacctttggaagacattccgatgatggctacaacgcctacatttttgaagcagtctaaagattcaaaacctccgattacctgtgacgttacaaaatctgcccagtctgtaattttaaaaacaccgcttgtaaactgaagttcctgtgtgtttccgatgtctgcaaattttctgtcttccattaaaaggaaattgtgttttgcagcaagagcttttaacggagtaatggttttttcgtattcaaaatccgaaataatatcaatgtgagtttttaaagcaataacgtatggtcccactttttcagctaaatctaataattcctgagttgtggtaacatctgcagaagctattaaattagattgttttgctaaagcagtttccagtaattttttggaaacggaatgttgtgcagcttctaatttctgttcgtaagaaggtcttattttttcttcaaactgaatgtggtttccctgtaaaaaatcctgaattctttttacttcatcatccgtaagctcaccgttttcacgaagaatggtgcagacttcagaaatattgaacagcgtatgaactttgtagccacggctttccagaagctcttttccgccctgttctctgtctaaaaccaccacgatgtctgcaactttgatgtcctcctgctcaacttctgcaatggtttcaattaaagattttcctgaggtgatcacgtcttccaccaaaagacagttttgtcctttctggtaaattccttcgatcagttttttagttccgtagtttttagcttcctttcttttaataattaacggaatgtagctttccagagacatcgctgtagccatcggaagtgctgcataaggaactccgcagatcagatcaaaattatccagaggaagcatatccagtaaataattggctaaattttttaaaattttcggatctgaagccaaaggtcttaaatctacataaaaagggctttcgattccactttttaaggtaaatcttccgaatttaatgatgcccagtttgtagcactccaaaaagaattcttttttactttccattattttttattagatgttgcaaatttaaggaaatgatgttaaatgtcaattgtgaattttgtttcgttttttttcaaacacgaatgacacgaatgttttcacgaatgacacaaaaattaaaaatatagacatctttgaaatcagtaaaatcagcgagattaaaaaattacgattcgcttttaacatttctccataaaaaaaccactcgtacaacgaatggcttttaatctatcttcaaattattttacaatttcggcatcaattactttcgtgctgcccgaattatatttttgctctgtttcccaaagaagaaatttatctacctcttttatcagctttggaattgccagtgataaaacagcaagatcatccaaaactccgattactgggacggcaacttccggcagaagatctattggtgagatcacgtataacaatcctaacaacggcagaataatatcgatggatctcataggatattctccttttctccacatttttatcattctgaaaatatcagggattttttttacgaaacctttgtggttaatcgcttcttttgccagattcagtttagaatacttcattttgtgtttaggtttaaataattttttttaactctgtaaatttcgcaaattctgtaccaataatttacaaaatttagttaaaattatttaataatattatctataaactgatgggtagattctgtgttccagtctcttgaggcatcttccttaattaaaattcttccgtctttatcaagcaaataggttgtaggaaacactttcggaaggattttctccgagatcggactttgcgcaatgtatacaggaacgttgtaattattttctttcagaaattttcttacggcatcctctttatcttccatggcaattaaaacaaaatttacatgatcttttctggtttcatacagtttctggatcgaaggccattcttttcggcacggaggacaccatgttccccagaaattaaggaaaaccgcttttcctttaaaagctttaagattggtactcggaacattaattcctttcagatcgatatcataatcttcttcgctgatgtgtaccgcattttcaatcgttgctaccggaaaaaatgcttcctgcagtttctcctttactcccggaataaatgcgataacggcaataactgcgatcagtacaatgtaaattatattttttttcattaaatctatattatttattttgtcccaatatattgaaagtaattattattaagctgataaatcagaaatttttttgaaacaacaccgtctttatcaacaatcggaatatacaatttgtctttatcaaatgtaattagtttcagcggacgttccggtctgtcaacaacgctgaaaaagtcaaaatcaacctgaattttattgagagttgttgtttttgttttaaaaatcttatcagaatcaattaactgatcctttcggatcgtaaatgcctgaattgcctgagccatatcttttgtagaaaaaatcccgttagaaataataagataatacatctgattattaagaggaacttttataatttccgaaataaaataaggagtatcagactgttctttattataaatggtttttatttttccatttgaggaatattgaataatctgatcaaaacttttcattgttcctcccagttctgtatcccaaacataaaatctgagttttttatcttcggaggtaataatgcttactttattatttaattttttaaagttatacaacagtgtttcaggattttcggaaatgaatttcttgaattctgcagaaaaatgtaaagattgggattctttaccatcatagtcgtcattctgagaaaatttttcatattcttttgaaaaaaataattctttattttcaagctttgaattttgagcattcaaaaaattcgaaatgcatagaattacaacaaaaaatctgaaaaatttcaacatattacaacaattctaaaatttcctgaacggcatcttttcctctgttcttagcataatatacctgaagatcgttatagaaattatcttttgtatatacttcaggatcagctttgtatttcatcagaagttctgttccgaatttcggacgcggtccccatgaatttttaacgttaaaatctttatccagaataatcactttcgggatggattcggttccgttcgttaaaaactgactgattaaactcttgtcgctgtctctcaggaaaatgcgaacctcatttttaccttcgaaaaatttaaccagagcaggaacggttgcacttgcatcaccacaccaaacctcagaaataattaaaattttaccgtcgaaatttttagattctaactgctttagctgttcttcatctgccacatacttctttaacgttctgtcgattctctgaagtccaagttcgtaataaggtttataatctgcttcctgctgattggaagggttttctaatctctgttttccgatttccacatactcttcgaaagagatgcctttttcccagtaatttttcactgctaaaattatgatgtttaaaaattattgatgtttcttgttttgttgatgaggaataaatctgccagaacaaacgccgccagactttccaccacaggaactgctcttggaagaacgcacggatcatgacgtccttttccttctacaattgccggatttccgtatttatccacactttcctgaggtcttaaaatcgttgccacaggtttgaaagctacacggaaataaatatccattccgttggaaattccaccttgaattccacccgaaagattagattttgtggtaaaatcttcattgaaaagatcgttgtgttctttccccgtcattttggcaccgcagaaaccgcttccgtactcaaaaccttttgctgcattaatgttgagcatggctttgcctaattccgcctgaagttttgagaaaacgggttcgccgattcctacaggaacatttttaatcacgcaggtaattgttccgccaatcgtgtttccttcttttttgatttctttgattctttcgatcattttttctgccgtttccgcatccggacaacgcacttcattgctttcggttttcgaaaaatccaaagcctgataaggtttttcacagaaaatttcgcctacggaagaaacgtatgcgttgatctcgatatccgataaaaactgttttgctaaagctccggcaaccacccagttgatggtttctcttgcagaagattttccgccgccgcgataatccctcaatccgtacttctgatcataagtaaagtctgcgtggctcggacgataagattctgcaatatgatcataatcttttgatttctgattttcgttttcgatgatgaagccaatcggagttccagttgtttttccttcaaaaattcctgaaagaaatttcactgtatcactttcttttctttgggttacgatggcagactgccccggttttctgcgatccaattcgtactgaattttatcaaaatctaccgttaaacctgccggaaaattattaatgattccaccgtaagccagaccgtgactttctccaaatgttgtaagactgagaagattacctaaagtatttaacatactacaaatttaaggctttttcttcagataaaaaggctcccgaaatatgatctatttaccgagaggattgatcgtataaataacagattttgcctgttttctttcctgattgtttaattttttccagacgaatccttttttcaggtttttatcatcaattaattgaggaaatatcccgagtttttcatcctgtgaaacgtagcctgcagaaatagcaggaagtttagaatcgtaattaaaaggataatttgccgaaacatgaaattttaaattaccaaccctgaaagaatcaaactttgtgctttcatagaccgaaggtttgtacaattgttctttttcaaattttcccataaaacttcccggattgaaacttgggaaatacgtctgcaaaatatttgggaaagttaaaaatccgataaaaatgatgcttaaaacagaaaatgccgcaaccgatttcttctggttaaaataatctctgaaaaggataaagaagatcacgaaaaagacatccataaaaaatctgtactgcgctgaaaaaagaagaaccaaaacacttttaatgataagcgagatacagatgaaagtaataattctgttttttttgatgaaggtaaaaacaacgaaaatgatcagacttacaataaaaagaagatttatttttgctttgattccattgagaaaaagccagtttctgatgtaatcaatggtagaaaatttctgaatttcttcatacgaatactgcatatcgtatgttttctgaatggcaaactgggaagatatttttaaaatttcaggattgggtttccagcttactcctaaatctattattgaaacagggaaaaccggataaccgaaagtatagatatttttaataaaaaacagtaaagcgattaaaattcctgaagttagatttttaaaaccagattttacaataaaaatggagtagaggaaactcaaaaccggcagccagatcatagtaggtttgatgataaaaacaaaaaccgaaaaagcgaacaggagagtggtttgtttattttgttttaaaatttcatttaaaatgatgagtgagaaaacaataacaggcaaatccggacttggcgactggcagaataatagtaaaaccggaataaaacaaagttgaatccagcttttcttttctattatatataaggtataaataatcagtacaacagaattgattcttaaaaacggatcagtgaaatttgaaaatcctgcctgaaaaatatgccataccgacatttgtcccaacgtgagatcgaggtttgaaataccttttaccaaacccaattctttcagccattttatagtgggaacataatatccgaaatggtctaaaatatagggataaaaagatccgctgaataaaataattaatgaaactaagcagatcagcgaaaaatctttttttgaaaaggctgtaaaatctttataaagtttatccttaaaaaaataaatcagtcctattgcaatagtagaaaattctacataacggtttaaaggaataaaaaatgcaagaattgtccacgataagcttattccaagaattcctaaaagaatttttccggatattccttcaattaattttcctgaaaaattttctacaattttccctgttcccattaaaacaggaatgagtaaaagtgtggaaagcaaaagtagaatcataaaaaaagattgcctaaaaataagcaatctttctcttttatgatgaaaatataattttatcttggctgtactctaccgctttttctatcctgcgctctacccaaagtatatcctgtagcaccaccgattaccccaccaatggctgcaccggctcccggacttttcttgttaacaattgcacctaaagccgctccacctacagcaccgatgatggtacctttagccgcttcactcatcccttttttcttagcagtagtctgggaacttccgttattggcatagcttccgttactcgaacctgaactctggctaggtctgtctctgtaaacagtacgggtttctcttatcacttgtggttttgcattggcagcagcagttcttgctttttgtacttctaaaacactgtctgcttttttctgtgcttcataagccattttttctttctcaatggctaatttttgtttttcaatttccaactgtctcatctggaactccattttctgctgttccaaagattgctgggctatctggtcgtcttttttacaggcagtcagtaaaaatatcgacatcaatcctgttaatactatacttttcataactcaaatttttataaggattttaagtcaatccaacttcgatgttatactgttttcaattttgaagccaaaattcagttaagcaatgttaaagttttttaacaaatcttaaatttttaatgtaaatcctttatccataatggattttatgctgttaaaaattgttgatttttgcttaaaatttaattaatatgaattctttatctttgaaataccaaattacagtattatgaaaaaatcaattgtaaaaattatgctttttgcaggcgtaattgctgtcgtaagttctttttcggcatctaatggtggttctgaaaaaaaatattcaccatctaaaaacatttctcagacagaaacgtatcaaatccgttttggattacagggtcagaatggttctaaaacactttcgggaagctatgatcttggaaattttgtagcaaccaatacggtaaccggagaaacttttgaaacgtatggcggaagcggaatgcagtctttgccacagtattttgatggtcttcctgcgggaacgtataccttcagtgcgacacaaggacagggaggatgggtaggttatggttctgtaacagcagaggtttctgaagcgcaagtggatgcggatggttatgttaccatttatgttcctattgcctgggaagagtagtgcaaacttatttacaaattagcaagtattttaagcctcctgagtaagggggctttttttatttatgacaataaagcattgttttatatgtattgagtttatggtattcaatctgaatttacaaattcataaaacacttatactaaaacagaaaagataacgttattaaaaaacaaatttgactgtgtgaatgatttagatagttaaattttgatgcgttttctgcaaaaaagattgtaatttatactatatattattaaaaaacgaattagatttgcagtacaacaataaattttctgcctatggtgaatttttttactttttttcaattttatcacaaactcaatttcccggatagttcttatccgaaagaagatttcttaagtaaaatttataactttcatatcctaagaggatttaatatgtattaatatgaaaaaatatctattgttttttttcttggcactttcatatatactgagtgcacaggtaaattcttatagtttttcgcaatctacgggaacctatacagatttgccaagttcggcaacggttttggcaacagcaacagggaatacaggtgcggcatcattagacaatgttgtttatccggttactcttccttttcctgtttcctttaacggaagtaattattcttccatcaatgtttcaacaaacggatttattactttcggagccaccgctccgggaaccgctacgtacagcccgatttccagcacggaggcttatgcaggagctgtttctgcatggggtagagacttaaattcagtttttaatattgcttctaaaacaggaagcatcagttgggctgttgtaggtacagcgcctaacagagagattgtggtacaatggtcagacttcagaccttcttattctacttctacaaccagtgtttatactttttcttttcagatcagacttagagaaactacaaacacgattgcagtagtatataaaggaggaagttatcttgcgggtactacttctgtaagcggaacgattcaggcgggattaagaggggctacgaatgccgattttaatcacaggctgaatgctaccactgctttgtttacggcttctactttggcaacagcgaacagcagcacccaatctttcaatacaaccgctgctactccggggatgccttcggatggacttatctatacatggactccgccatcttgtttcggaccttctggttttgcttcttcgggagttactacaaacagtgctacggttacttgggcggctgcttcaacgcctcctgcaaatggatatgagatctattacagtacgacaacaacggctcctgctacaccacagattacaggtattgcaggaacagctacaagctatactataccgggattagctgctaataccacgtattatgtatggattaaagcaaagtgcagctcgacaactcaaagttcattaattggacctattagtgtttatacgggatattgtactcctacaggcggtacttcttccactacatattatttaaataatgttacgacaaccggtggatggaccaatcttgcttacaccgctacttcttatcaggcttatgtaaattctccaggagtaatattgagttctccgggaaatacggtgacggctaatttagctacatcaggtggaagtacttattattattacgtatgggtagactggaataatgatcttgattttaatgatccgggagaaacaattctggcaacgacaagttacactgcaactgcaactgcgaatattgttattcctgcgggacaggctgtaggaaattacagagttcgtacttcatcatcatttatcggagctaatacttcgtgcgggccttctccgtatggaaacttcgtagattttactttatctattgtagcgcctccaacatgtttacctccaactggtcttgttatcagcaatgcgacaacttcaagtgcgacaatacagtggacggttccggctataccgccggcaaacggatatgatgtttattacaatacaaccggagttgctcctacagcagcaacagttcctcagtatactggtgttacaggacctagccagttgatcaccggtttggcagctagtacaacgtattatatttgggtgagagcaagatgcagcagctcggatattagttattggtccggacctcgtacggtttatacaaactattgtgttcctacaggaggttcttcttctactacttattatctgaataatattacgactactggtggatggactaatttagcttacacggcatcgtcgtatcaggcgtatgtaaatactcctagtgttgttttgagttctccaggatttacggtaacaacaaatttagcgacatctggtggaagtacttattactattacgtatgggtagactggaataatgaccttgattttaatgatccgggagaaactattctggcaacaacaacgtatacatcaactgcaacagcaaatattgccatccctgcaggacaggctttaggaaactatagagttcgtacttcttcatcatttattggtgcaaacagtgcttgcggacctgctgcatatggaaattatgttgattttacattatctgttgtagcgcctcctacgtgtctgcctccaactagtcttgtgattgcaaacgcaacaacatcaagtgcaacaatacagtggacggttccggctacgccaccggcaaatggttatgatgtttattacaacactacaggagttgcccctaccgcggcaactgttcctcagttcacaggagttcctgggcctagtcaattggtaacaggattagcttcaagcacaacgtactatttctgggtaagagcaagatgtagtgcttcagatattagttattggtccgggcctcgtacggtgtatacaaattattgtttgccaacgggaggttcatcatcaacaacaaattatttaaaaacaattacttctacaaacggatttacaaatctgaattatactgctacaagttacagtgcatatgtaaataattcggcgacaagtttctctgtattgcctggaggaattgctaacgtttcgatgaatgcaggaacaagctcttattattattatatctggatcgactggaataatgatttggtgtttgatccggctactgagcaggtttattattcaggggggtatgtaaattctgtaaccaacgctcctataagttcggtaggtcgtccttcgggatcttaccgtgcaagatttgcagcatcttatattggtacaattacgccttgtggaccggctccttatggtaattatgtagattttacatttatcattaagccatgttctacaacagcacctaccaatgtttatgtggatgcaattgctcataatgcagcaactgtacactggactccttctcctgataacctgggttataaagtatactggagaaagaacggaacgacagcatgggtgaattcctcagttgtaatagcaccaccggctacatcttacaccataactacaggtttagatccggctacaaaatatgatgtaatggtagttgcagtttgtaacaataccgaaggtactgctactccggctgtgtttactacgagatgtgatcctacacctccgaatgtaaccataagtaatattaccacaaactctgcaatcgtaacttgggctcctattgtggcgagtgctacttatgtaatcagatatagaattgtaagtacaggaacatggactactgtgaatatcactgcacctcctttaaatacatatccacttaccggattaactccgtatacaacctatgaagtacaggtagcaaatatctgtaacggagaaaccacagttaacccttggtctaatcctaaagtatttacaacggaaagaacgtgtcagttgcctcctccgggacttaccattacagcgattactccgactacggcacaggtaacatgggatcctttcccgggtgctacttatatcttaagatacagaaaagtaggaattccgagctggacaatggttccgtctaataccaatacgattacccttacaggtttatctgaattgacacagtatgaaatgcaggtagccaacgtttgcagcggaactccgggaacgtatacacttccttatttcttcacaacgccaacgattgtttattgtcaaatggcatcaacaggagctataacttcagaatatatttctaaagtaacggtaacaccaaacggtaaacctcagatgacaaatatttctgtaggatctaattattcagattatacaggagttccggctaaatttatcgagctgattcagggatctacggataacaagatcgtgatcgataaaaaattagcaggaaacaataaagcaggagttgcagtctggatcgatttcaacagaaacggatacttcgatatcaacgaaagaatccttgctgatggaccaaacagcaatcctaccgcgagcactacatttacagtacctgcagatgcattcatcagtctggtagactacaaatatgtagtgatgagagtggcaatgggcaaagatatcattccggtaaattgtaccaacttcccagatggagaagtagaagattacacggtaagaatttctaagcttccggttcctaattcaatcaatcagtctgatatattaatctatccgaacccggttagcacaatattaaatgttaagaacattagtgcgagagggaattataagatctataattcagccggacaggtggtatcaagcggtattatcttaaacaataagatcgacgttcataacctgataaacggagtgtatgtaatcgatattgaggattctaaaggaactgtacaaaagaagttcattaaagaataaaataattaataatttacacatgataagccttcagaaatgaaggcttatttttttggtttgttaataaatgttaaaacatgaattatagaataaattcgatgattgtagaatggttaatttgttatatgccggtaattacagcaataaaagaaagttagggtaggtaaaaaagaaaatatatcctgttataatgaaattaacagttttttaatctttaataaaaattgttaattgatgaaattaatatttcatatagatgcatgtaaaactaacatttcataaatttgcagtcactcatgtttaatttgagttttcatggttattagtttttatcctcgtagaaatacggggattttttattggttcaaaaaagatagcaagagagaaagaagaatagaagcttttagttttggtttttggcaaataagaacactttaaacctgtcgttactactgtaccttttacagctttcatccataaacaaatcgggcgattttttaaactcttcaatgtacttaaggccttcttcgtcgatacttggaataataatgtaatcgtacagtgtttttgtaaactcgctggaattttttaaaatgttcttcttgtgttttaatgcttcgttaaatgtcatgattttagtttacgcaaatttaatcattattaagtgaaaaaagaagtgtcctgacgaagaaattttgtatgcaatatctaatttttttacaaatgtattgtttaattatttgtatttcaattgattgtgggtttgtttttcgtttttaaattagaattatttctatgaccagagtcatatgatacaagaatagtaataactaaatttaacaaataacatttaaatgttttagtatctcagtaagtttgcctctcattagtgagaggtttttttattatgactcagatcatatcaggaaaaatagtttttattgtagctttaaaacttcaatttacattcgttttagcagttttagaaacttctcagtttttctgggaagtttttattttcaggtgcgaaaatctgtaaaatgagaaattgttgggaaaagggtctggaaatcataaaaaaaatccctaaaagcttgaaacagcaatttagggattttaaagaggtacctagcggattcgaaccgctgtagatggtgttgcagaccactgcctagccgctcggccaaagtaccatttaccatttttgaggtgtgcaaatatagtaaaatttattttcgaacaaaaatttttaaacaatttctttcgtgccaatgctctctatttcgctttttgtctgtctttcagtctcataatttttagtatgaattacccttgtatcgctccagctatcgtgccatccgttttcgccaagaaaagaaagtacatcaaaaggaacaagtcttgaaatattccgtataaaataatcctgtaaagtaggagatgtaccgtctgtcataataactttcgttcctgtaatgtatttgcctactgtttttccttttgtaaaatattccataagaaaagtatagagaaaatatacaaccgaagtaaggataatatcggcaagacgaccaattccggaaagtttataaatcattggagtgaaataatacattccaaaaacattatcaataaaaaccaaagcaataccgagaaggaagaagaacagattcatcaccagtttatcaataaaaagatttgcaaatctctgccatttcgttgctctgtggatatccacaattttaagatactttctcatgtgtattagtttttttataaattttaaattcctgttagtgttaattttaaagtggctttagtatcaataacggcagtaattccgtaaggattgaggaggattttgctgggtttgaggctgaatacttttccgttcatttttaagcccttataatattctttattgaatgcttcttcgatacttttctttgaactgttttccagttcctgagtaggaattccgtattcttcttcaatcatttttacgattcttcctctgaagagcagcgttgctgttttctgtaaaatattggctgttttcaggttgaattttgtattggacaatacaattttctttttcgcttcatcatacacaggaataccggaaataaaagcttttccgtttacatacccttcggtttccgcttctatcatcaccttatcatcaacgccgtatactttaatatctttaatttttacggatgaacctcttacatcatattccttattcaaaaacatatttctcgcaatattggtcgcttctgtaaacggaatattggcggtggtctgaagcagaaactgatttcccaaagtcggaataaatgtgaaacccggagccgattttatcgcaggagcagaacccggctgatttcccgtaaatgtttcagaaaatacatcaattccgatgttggtatcaatctggttggcgtaaaattttagaggagtgatgtttacctttaccggagaaactttcagccacgttttgtattcttcagaaatattaaaaggctgtgcaaaaacattccacgccattacggcgtattgctgaaagttgagctgggttgccatttggctgtcgatggttttacagaacttttgctgttgttccaccagactcttttccaccagagaagtgatcgggatttttattctcccgtaatccagaaccggtttggttacccatcggaaaccattgggttttgtattggttgtgatggtccagttattctgaaaatttaataccgcactaaaggacatcaccgtttcaaaagtggtgttctgatacgtgtaaattcccagcgttccgatgcctttttctgcccagacttttaaaggaacttcgatgagtatgttttgattggttcctcctgcaagacgaatagggccggttttccagacttttactttaaactggtcattgtcgttatccgtgtaagaatcatcctgataaatcagatcctttaccgatgcattaatcatattgctgatttctgaaagtggaatggcaaccggcatcgttatactggattttactttcggaaaattatagttcggaacttcagaactcatcgttgtttgtcccgaaacagccgtacaaaacagaagaaatattatttttacaactttcaattgtgtgattttttataaatgaatatcagaatttaaggcttaaaacgtttttcaagctcaacagcagctcctgtcatttcgcctttcatcggtggagctgttttcgttatttttaatttgatataatctacctgcggaaatgtctcatgaattttaaagatgattcttcctgcgacgtgttccagcaatttagactttattttcatctcatcgtgaatgatatcattgatgtctgcataactgatggtatctttcagatcatcagaagctgctgcattccagagatcggtatgaagttctgcatttacaatataataggtaccaacaatattttcttccggaagaacaccgtggtaagcatatattttcacgttttctaaataaatcctgctcatagctcttaaatttttgtaagcaaaaatcgttttaattctgcaaaatcgggactaatttcaatactttttttctcttttttcattaataattctaaagatttgggtaaatctgctgaaatatgaatggctttttccactgcctgaggaaattttacgggatgtgcggttcccagaatgaagccttttttagcattatttttaaaatatttctccatgactgtgtaggcaaccgcggcgtgaggatcgagtaggtaattgtatttttcatgcacatttttaatggcagctaatgttttttcatcatctacagaatatcctgaaatcatatccgctaaatcctgaaatttattttcaaaaagcgttaaaattcttacaaaattactcggatttcctacgtccattgcattagaaagtgtagctaccgtttcttttatctgtaatttttgtgttcttaaatagttgggaataacatcgttttcgttacacgcagcaataaaatgttctacaggaagtcctcggaaataagctaaaattccggcacacagattaccaaggtttccgcttgggacagcaattacaggcttctctttttctgtttttttccattgcttcagcgcgagcagataataaatttgttgaggaagccatcttgcgacatttatggaattggcagacgttaaaaataattttgaattaatttctgcgtccgagaaagcctgttttactaaattctggcaatcatcaaagctgccatcaacttctaaagcagaaatattttcgccaagtgccgttaattgtttttcctgaacttcgcttacacgattttttgggtaaagaataaccacattaatattttcagttttataaaatccattcgcaacggctcctcctgtatctcccgatgtagcaaccaaaaccgttacttttttattttcacttttcagaaagtaggagaggcagcggctcataaatcgggctcccacatctttaaaggctaaagttggtccatgaaaaagctctaaagaacagatgttttcattgatttttttcaacggaatttcaaagttgatggtttccgaaacgatttgttttaaaatctctgaaggaatttcgtcgcccacaaaatctttcatgcatcggtaggcaatttcttcatcggtataaagatctaaattttcaataaaatctttttcaaataatgggatatattctgggaaaaacagtcctttttcttttccctgtccttttatggtagctgttttgaaatcaacaacttcttctttatcttttaaattgtaatacttcatatgctgatttttattcttcaataatttctattcctttagggtttactttagagacatacgcgaaactttcaatgttgattttactgtaaacagatttcatcatttctgctatttcgtatgaaattttttcgttttcggaaagcataaaaacggaaggtccggaacctgaaatccctccgcctaaagcccctaaaccgagacttttttctttaatttcatcgaatttaggaatcagaaggcttcttacgggttctacaataacatcctttaaacttcttccgatcagtccgaaatcattgttctgaattccggcaatcagacctgcaatatttccccattgctctatggcatccttcagaagaatatttttcttcagaatctgtcttgcatcagaagtttttacttcaatctgcggatgaaccgctgttacaaataagtccggagaattcagcggaataatatcaatgggatttgaagatttgattaatgttattccgccaaaaatacagggcgtgatattgtctgcatgtttcacccctgaagctaattcttcaccaaacatggcaaaataaatcatttcttctttagagagaatatttcccagcaggcagttggctccaaaagcggctcctgcagcacttgccgcactggaacccaatccgcttccgggttttatctttttatgaatgattacttcaaagccgtttttaagatgtaattcttcctgaatttttaacaaaacttttccggcaacattttttgaagtttcttccggcagtccgaaatcgtctctgtgtctgataatgatctcagaggtttccagcagtttcagttccattacatcaaacggttcgtggattgccattcctaaaatatcgaatccgcaaaccagattggcaatggtagccggaacttttaattttacttttttcataactcaatttttaaacagaacggaggatatctgcgaaaacaccacttgctgttacttctgcaccggctcccgcaccttttacaacaagaggctgttcataatacctcaacgttttgaaaattacgatattatcttttccatacaggtggaaaagatcgctttccggagcaatatgctttagtcctacttttgcttttccctctttaaattcagcaacatattttaaaattttgcctttactttttgcttcttccaaaagatttctgaaatgatcttcatatttggaaagagcatcataaaagtcatttacggttcctttcatgcattcttcaggaaggaaactttcattttcaacagcagtaaactcaatggggtagcctgcttctctggcaagaatgataatttttctggcaacatcagttcccgccaaatcgagtcggggatcgggttctgtgtaaccttctttttgagcctgagacacaatttcagaaaacgttctgcttccgtcgtaattattgaacacaaaattcaaagttccgctgagaaccgcctgaatagaagtaattttatcaccgcttcggataagatcattgattgttccgataatcggcaatcctgctcccacattggtttcaaaaagaaattgacagctatggtttctggctgtattttttaagtttttataattttcaaagtcagaagaagcggcaatcttattacacgcaacaatatttacacttttcttcagaagctgctcatagatattcggaacttcggaactcgcggtaacatctacgaagacagagtttcttagatttcttgaaataatttcctgcgcaaatttttccgcagaagcttcctgaccattgtgatctaaatctgtaaattcattttctgaaatccctttttctgagaaaatcattttacggctgttagataatccagcaattcttaaattaacaagaaggtgttctttaagatattcgttctggctatagatctgctgaattaacttcattcccacatttcctgttccgcagatgtagagatgcacctgttttatttcggactcaaaaaattcttcatgtaaaacattaaccgcttttgtaatatctttttctgaaataacaatgctgatatttttttctgatgatccctgagcaattgctctgatattgatgccgttatttcccagacaaccgaacattttggcacttacgccgcttctgcttttcatgttttctcccaccaaagcaacaatcgcaagatctgtttctatctttaccggatcaattcttttgagttttaaatcatcttcaaaagcagaatcaatggcactttttgcgttgaaaacatctttttcgctgatcgcaatcgtgatagagtgttctgaagaactttgggtaattaaaatgacattaattttctcctgactcagacactggaatagttttgcagaaactccgggaatgcctatcattccgcttccttctacagtaagcagagcaacgtggctcatattggatacaccgacagcaatttgttcattttcaaaatgagatttttttgcataatgagaaatcaatgtaccctgagcttctggatcgaaagtatttttgattctcagattgatatttttcaccattaccggctgaatggtgggaggatacagaacttttgccccaaaatgagaaagttccatcgcttcggaatatgaaatttcagcaataggtttggcattggaaaccaatcgcggatctgaagtcatcattccgcttacatcggtccagatctcaagttcatctgcatggagaacagaagcaatgattgacgccgtgtaatctgaaccgcctcttcctaatgttgtagcattttcttttgcatctttcgcaatgaatcccggagtgataatgatctgatttttattttcattcagaaattgactgagattatcttctgtggcttcaaaatttacttttgcattggtgaaattactgtctgtaacgatgtgagaatccatccagcaagcatccgaaccatttgatttcagtctggctgtaataatatttgaagaaagaaattcgccgtacgatgtaattttatctttgattctgtctgtaaactctttcaggataaaaatgctgttacagatgtcctcaatatcattaaaatgtttttttacgaaactgagccatgaactttgttctgaaaagggaatcaggtctttaacaaggtctaaatgtttttcttcaagatttttaaggatgtgaatataattttctttgttgtgagaagcggcttctgcagcttttatcaattgatctgtaaccccgtgaagtgctgaaacgacaacgatgattttgttgttccgagattcttttttaataatgttttctaccaacattatattttgtgaatgggcaaccgaagtgcccccgaattttaaaactttcattatttgttttttaattatagaaaattgaattttactctttaggaaaaagagtacgcaggcttataatgatatgtgaaaatgcaccccgttatggggtagttgtagttgttgtagcaataatagaaacaaaagatacttccgaaatagagaaaatcggagtggaaatatcagatatgtttattaaaaaattcattgctgtatgaacaaatgtacaaattttttgaataattaacttggttggttgaattagtttcacaaattgtaactaatttttttattcagtcaacatcctgtaaaatacaaattttgttattaagtttctgaattttagatttttaatgattttttataaatactttttactaaataagaattaatttatcaataaaaggtgatttgttgtgtttttttattaatttaggcattcaccaaaacaaattaattattatgaaaaatctaaaaaaactgaacaggcagaatctgcgttcaatcagcggaggtattacagacaattgtgtggtagattcggattgtggtccaaaaggatgtgcggtatgtacagatctgagaggtagaagagtatgtctttatcttaacaattatgatccgtctaatcccaatagctgcttaatattagaaggttaaaaactcaattataattattatgaaaaaactatcaagatcaaaattaaaagaaattaaaggagcaacaaactgtggaggatgtcctgttcagaataattacggggacggtccggaatattcagcttcatgttcaagttacttctcattatcacagaactgccagatgtgcgtagatgtaagcgcagactgttttgaaaactggaactaaaaacaaaaaagcactgccaaaacagtgcttttatttattttatacttttagaaagatcaagcatcgcttcgatgggctttaaagctcttaatcttaaatcttcatcgatgatgatttccggaagctcatatttcatacataaatacaatttttccatggtattgcgcttcatgtagaaacattccgagcagttacagctttcatcaaaaaccagagcaggaattaattctttatgaggagcacgttttttcatttcgtgaagaattccttcttctgtagcgatgatgaatttctgacagtcgtctttttcaacataattcagaagggcagaagtggaacctataaaatgagccagctttaaaacggcttcttcactttcaggatgtgcaattaattttgcatcaggattatctgccaattgttttgcaattctttccatagaaaatgcttcgtgtacaatgcagcttccgtcccaaaggatcatatcgcgtcctgttttctgagataaatatcttcctaaatttttatccggtgcgaaaattatcggtcggtctttcggtaaagcttcaattactgtttcagcgtttgaactggtaacaataatatcactttccgctttcgtttctgcgttacagttgatgtaggttgcaaccaaagcatttggatgctgttcgcgcatttttctcagaccttctccggaacatccgtctgctaatgaacaccctgccattgtatcgggaagaactacttttttagtcggattcagaatcttcgccgcttccgccatgaaatgaactccgcagaaaacaatcatgtccgcatccgtatcttttgcctgtcttgccagttgcagagaatctcccagaaaatcagcaatatcctgaatgtctccgggttggtaataatgcgccagaataacggcgtttttttcttttttcaatttaagaattgcctgtacaagctcttctccttgaggaattgctatatcttttatatccagaaatcctcttacaggaatcgcagatttagctttttctaatgtttcggtactcatatcaacctcaatgttttagaatcagaaattaaaaaataggaattaaaaattagaattttgacgttttataataaacctcaagcttctgtttccattctttaacttccaataaaattttttattaaactttctatttctttttttgcttcgctcagatcgctgttgatgacgattttatcaaattcctttgcgtaagacatttcttcttctgcctttgccacacgcgttttgatggtctctgcatcatctgtgttccttgagatcaatcttcgttccaattcttcaatagaaggcggttcaatgaaaatcgacaaagcctgttctccgaaatacttctttaaggaaattccgccttttacatcaacatcaaaaataactgtttttccctcattccagatcttttctacttcagattttaatgttccgtaatatttgtcggtatacacttcttcaaattctacaaaagcatcttccgcaatcttctgtctgaattcatcgggcgttaaaaaatgataatccactgcatgaacttcactgcctctcggctgtctcgttgtacacgaaatcgagaactgcaattcattgaaaacctccagagaatgctttaccaatgttgtttttccgcttcccgacggtgctgaaaatatgataactttattcatatagttgttggttgatagattatagttgatagcagtaaaaaaatccaacaaccatcaactaaaaaccatcaactaatttatagtacgttcaacgtttgttctttaatcttctctaaatcatccttcatcatcacgaccagtttctgaatttcagaatgattggctttagagcctaatgtattgatttcacgaccaatttcctgagaaataaatccaagtttcttaccgttgaaatcttcattgtccattacttctttgtaatatttcaaatgttgggaaagtcttactttttcttctgaaatatccagtttttctgtaaaataagccatttcctgatagaaacgcgtttcatctacattctcaaactcttttaaagttttctgataacgctccttcactgccgaaattctttcttcttcgaacggaataacttcacctaagtatttatcaatattctgaatatttctttcaagctcttcatgtaaaattttaccttccgttcttctgaattcttcaaaacggtcaaccgcagcattcacaatttttgccaaagcttcccattcgccttcggataattcgtccggtcttgaagttatcgcatccggaagcctcactgccattttcagatattcgaaatcgggtccgtctgaagcgatgtttttcagctccttcatgtaagaatcaattaaacttttattgattttcacatcgttggactcctcaagattttctatattgatgtagcagtctacttttccacggattattctgtcgttcagaatttttcttacctcaaattccttctctttatatcttaaaggaattttgatatttaaatcaaaacttttactgttcagtgatttaatatcgatggtaatttttttaccttcaaaaacgtcttcggctctaccaaagccggtcattgataaaatcatagttttttattgtcttacaaagataaacaattaagtgtatattttggctaatgttgaaagagggaggcggggagaaggaagagggaagagggaagagggaagagggaagagggaagagggaagaagggggcgggaagattgttgtgtatattattgaatacctattttaacatccatcttcgttcttcccatcttccagccaattaaataaactcattttcgtaaattagcgcggtgaaaaagaaaaaattaatttctgttgtaggacccaccggaattggtaaaacaagactggcaattgatctcgcaaaacatttcagcacacagattgtttcgtgtgattcgagacagtttttcagggaaatgaaaatcggaacggcttcaccgtctgctgaagaacttgctgaagcacctcatcattttatcggaaatctttcggtggaagcatattattcgatcgggcaatatgaggaagatgctttaaaaaagctcaatgaactttttgaaaaatatgaaaccgttattttggtgggcggaagcatgatgtatgaaaaagcggtgattgaagggttgaatgatttgcctgaagcagatgaaaacaatcagaaaaaattacaggaaattttcgaaaaagaaggaatcgaaaaacttcaggaaatcctgaaagaactcgatcccgaatattttgcggtagtcgattttcacaatcacagaagacttttgcgggctatcgacgtgatttggcagacgaataaaaaatattctgaacaaatagctgtttcgcaggattccagagattttaaaaccatccgtatcggaattgaagcaccgagagaagagttgtacgaccgaattaacaggagagtggatatgatgatggagaaaggtttattggaagaagcaaaaagtctggagaaatttaaacatctcaccgctttgaatacggttggctattccgaattattcaaatattttgatggagaatgggatctggattttgccgtttccgaaattaaaaaaaacagccggagatacgcaaaacgacaattgacgtggtatcggaaagcgaatgatattcattatttacagttgggatatttgcagaaagattttgatggtttgattggttatattaatgaggaatttcaaaaataaatctttttgaaccattaagattttaattaagaggtgaagaatattaaggtgaacttcgcttttagtataatatgtttattaaatctatttgatttttttaattaaacttttaactccttaaatgttcttaatggttcaaaattttcgcagattgtcattctgacgaaggaagaatctctacgaagatattatagattcttcactccatttcatttcgtccagaatgacaatgcgagcggttaaaaaatttaatttaaacaaaaaaatgcagccccgaaagactgcatcccataacaatataattttaatttactacttccaaccgcctcctaaagcccggtatagatctacaatactgctcaatctctgtcttttcacagacgccagattaagctctgcctgtagagaatttccctgagctgttatcacttctaaatagtttgccattccgcctttgtacagcatttcggcacttttgattccgttttttaaggttgccacctgttccgttgctttttgttcctgaacttttaaactttcattggaaaccaaagcatcagaaacttctcccactgcatttaaaaccgactgacggaacgccaaaacatttttctctctctgaattttagccacatttaaatctgttttcaattgtcttttctggaaaatcggctgagtcagacctcccaaaacagaaccgaacaatgaagccggaatctgaaaccagttatcaattttaaatgaattgacaccgccatttgccgtaattttcaaggaagggtacatgtttgcctgcgcaattcctaccatagaattggattccagtaaaaccagttcctgctgacggacatccggacgacggcttaccattgctgcgggaagtcctgcggaaatatcctgtggtaaagaagtatcagacatttcaatcgttctgtcgattttatttggattttcacccaccagaatactcaacgcattttcctgaatcgcaatgttttgctccaattgtgtaatcaaaagttcagtcgattgtttctgagccgttgcctgttgaactcccagagaagtggtgtcaccgctttgccataatttttctgtaagagaaagcgtacggttgctgagttccagattagattgggcaatctgcaattgtttatccagcatcagcagattgtaatacccttgagcaattgccgcaacaacctgcgtctgaatagcttttgttgcttcataagtctgcagatactgcattttagaaacttcctgctgatttttgattttcccccaaatatcagcttcccatgaaaggttgaatgctgcattgtaatcttcaacatagctttttcctaagaataagttcagactttgtccgttcatgctgtttttggaaggttttgagatctgtgcggaaactccgaaaccaacatcgggatactgaagatattttgcctgtttcagtttttcctgtgaagaagcaacctgttttaaagcaatctgtaaatcgtaattgtttttaattcctttttcgattaagttttgcagcatcggatcgctgaaaaactgtttccattccagattcgcaacacttgctgtatctgctgttgcggtatatttaaaagtttcgggaagctccagttcaggctccttatatgcaagtttcgacacacaggagactgaaaccaaagccagtccaaaagtgatgatgatattttttattcttttcataaaggtttaaatttttaatggattacaaaactttgaaaaattgtttcacagcagttttttttctactttttgttttgaaattttttaacgcaaaggaaaatttttgatataaaatatttaagtgagcaaagatttaatcaatgaaattgattttaagaagcgaacttttaatcatctagcttcatcatcgacttgtcgctttctttgctcctttaaaaatattcgcaattaataataaatcttcgattaaattcttgtttgaaaatctcaaagtttttttactttttgttttgaaattttttaacgcaaaggaaaatttttgatgtaaaatatttaagagagcaaagatttaatcaataaaattgattttaagaagcgaacttttaatcatccagcttcatcagcgacttgtcgctttctttgctcctttaaaaatattcgcaattaataataaatctttgcgtttaaattcctgtctgaaaatctcaaaattttttttctactttttgttttgaaattttttaacgcaaaggaaaatttttgatataaaatatttaagtgagcaaagatttaatcaatgaaattgattttaagaagcgaacttttaatcatgcagcttcatcagcggcttgtcgctttctttgctcctttaaaaatattcgcaattaataataaatctttgcgtttaaattcctgtttgaaattctcaaagttttgtcaatcatatattaatgagctgctgctaaaagttctgcctccagtttctgtctttgaagtcttttcttttttctgctcggcattttttcatgtaaatactggaagatcacaaacatcacgggaataatgaatattccaaatacaactcctgttaacattccgcccacagtactcattccgatggaatgatttccttttgcggaagctccctgagtccaaactaacggcagcatcccgatgatgaaggcaaacgaggtcattaagatcggtctcaaacgtaatctcgaagcctgaagtgcagattccagtaatgatcttcctgcatttcttctttggacggcgaattctacgatcagaattgcgtttttcgccaataatccgaccagtatgatcaatccgacctgaacgtaaatgttgttatcaattccagccagtcccgtgaaggcaaatactccgaaaatacctgtaggaatcgttaaaataacggcaaacggaagaatgtaactttcgtactgagctgccagtaagaaatagacaaacaaaatacttaacataaagataaaagtggtctgtccgcttgttttaatctcttcacgggtgattcctgtccattcgtacccataacctctcggaagtgatttctgggctacttcttccactgctttaatcgcatctccggtactgtaacccggcttcggtgttccgttgattgttacggcattgaaaaggttgtttcttgtcactgtttctggtccgaagcttctttttaaagtcaccaatgtttttacaggaaccatttcgccggatttatttttaacataaattccctccagagaattcgcatcggtacggtaaggaatatccgcctgagccattactctgtagtattttccgaatcggttgaaatctgaaacaaagctgcttccgtaatagatctgcatcgtctgcattaattctgtaattgaaacacctaactgattggctttatcattatccacttcaatcgtgaattgtggatttcctgctgcatacgttgtaaacgcgaaggcaatttccggacgtttcatcaattctccgatgaaagcctgagtattggttcctaattgttccaaagagccgttcgttctgtcctgaagcataaattcaaaaccggaaacgttaccaaatccctgaacggtagggaagttgaagaagaatgcattggcatctttcacctgcgaaactttccctgttaatcctgctgcaatctgatccggatcgctgatttcacctcgctgatcatggtcttttaatttaatgaaacctgcggaatacggagaagcattggcattactgatgaaattcagaccgtctgcaacccagaggttttttttcgctttttcaccgttgatgattttatcgatctgctccgttgcgttatgtgttctgtctaatgaacttcccggaggagtattcacggcatacaaaatgaaaccctgatcttcggtaggaataaatcctgacggtgcttttttaattaagaaaacacttgcggcagtcagcaaaaccagtcctccgacggcaacccatttgtttttaattaaaaatttaagactgtaaatatatttctttgttaaattattaaagcttgtattgaaagcattgaaaaatctcgctccgaaacctgtttttttcccatgttcaccgtgttctccctgaggatcatttaataatagagcacaaagagccggacttaatgttaaggcattcaccgcagaaatcataatggcaattgccagtgtgaaggcaaactgtctgtagaaaactcctgcaggtccctgcatgaaaccaaccggaataaatacggcacacatcaccagagtaatggaaataatggctccggaaatttcactcatcgaacttgttgtggcttgttccacaggcattccggtatgttccattttggagtgaatcgcttccacaacaacaattgcatcatccaccacaataccaatcgcgagtaccaaggcaaacaaagtcagcatattgatactgaaaccaaataactgtaagaagaagaaggtaccgataatcgcaaccggaacggcaatcgccggaattaaagtagatctgaaatcctgaaggaaaatatacactacaatgaatacgagaataaatgcgatcactaaagtttcaacaacctgatgaatagacgcgtctaagaaatctttagaattgtacatgatgatcggttccactccttttggaagcgttgttctgaactggtctacctgtttttcaatttccgttaagatctcgttggcgttggaaccggcagtctgcataatcgcaaatccggctaccggtttcccgtccactctgttagctgctgtataggtataagatccgaattctactcttgccacatcttttaaccttaaaaatgaaccgtctgtattggctttaatggcaatgttttcgtagtcttcgttcttgtttaattttcctttgtattttaaaatatattcataagtttccttgcttccctgtcccaaacgacccggagcggcttctaaattgtgatcttttaccgcgttcagaacttcctgtggcgaaagtccgtttgcggctaatctgtccggtttcagccagagtctcatggaataatctctcgttccgaaaacctgcgcctgagcaacacccggaatacgctgaatctgtggtatgatattaattttcagataattctgtaaaaaaagttcgtcatattgtttaggatcgttactggataaccccatgaacatgatcatactgttttgtactttctgcgtagaaactcctgcctgaactacttcctgcggaagctggctcattgctttcgatactcggttctgtacgtttactgctgcgttatctgcatcagagccctgcttgaagaaaacattcagcgtcatcgtaccgtcgttactggagttggaagtcatgtacgtcatgttttcaactccgttcacagcttcttcgataggcgtagctacagaacgtgcgacaacctccgaatttgctcccggataaaatgccgttacctgaacgctcggcggagcaatatccggaaagagagcaatgggtaaattaaagagggagagcgcccccaataataaaagtattatggagatcacggtagagagtaccggtctttctataaattgttttaacataagaagtttattttttaatgtggtttaaactttttagctttaaatttttaacacttaagtagcttttagtttaattaaaaagtttgtatgcagttcactttagctgaaaatcaaagattttcaaaaccttatgtgtacttattgagcgattgctttttaacttacagtaaattaagtgtttaaaaacttttatgacttttttgcttgaagaagtttaaacggttataatggttttgctttcagtaagctgtcggatgaaatcgctttcggcttgatagaagcaccatcttttaacattccgattcctgtgaatacgattttttctcccggctgtattccttcggaaataaaatagtagttttcagtctttcctgaaatttttacaggtttaccggttactttctggtctttgccaaccacataaacataggttttatcctgaatttcaaacgtagattcctgaggaataactactgcatttgatatcaattgaggcatacgaactctgcctgtatttcctgttctcaacgttccgttggtatttgggaaaaccgcacgaacgctgattgctcctgtagatttgtcgaactgtccgtctacgatgctcatttttcctttttgcggatagacactgttgtcggcaatcaccaaatccaccatcggcatatttttcagtttttcttctaaacttgcgccctcatatttattctgaaaagcgataaaatcaagttcacttaaagaaaagtaagcgtaaatctcgctgatgtctgatagtaaagtcaacggattcgcatctgttctggagatcagacttccttttttgtgaggaattcttccgatgtatccgcttaccggagccgtgatggttgtaaatccgatattgattcttgcacctacaacggaagctttcgcctgtgaagcggcggcaactgcggcggcgtaatttgcttttgccgttctcaattgtacttcagaaacgacttttgcagcaacaagaggttccagcctgtcaacttccactttagctttctggatattggcattcgcgacctgtaagttggcatttgccatattcatctgctctccgtaagctctggaatctattttaaataatggctgtccggctcttacgtatgcgccttcttccacatagattttatctaaatatccgtcaacctgagatcttatttccacgttgttttttccttccaaagcggcaggaaattcctgataggttgttgcgggagatgtaatgacggtataaacgggcagttccggaacgggtggagcagcgttggctccttctgcagcctttgtacagttttgtaaaaggataattcctgagagaagtacaatgaatcttatttttccaaatattttcattttgagtttaatttttaatgaagtgttagattaagtagtgatgtttttaagttgaattccgttattttttctaacggtgttaatttttagttcaaaaaaaattatagaattcttaatgtcgactttcagatcgttgttttcatagctgaaatttttaatgtggttagatatgacttatatgaggtgtgaagtgtgttacttttgctaacggtgttaattgttaaagtaaaaaaaagatcaataattaattgtttacattctgcatgattgttttttaatttttatttcggtttaaatgaataatttacattaatagatgttaatattcctaacggtgttaatttttagttcaaaaaaatttacaaagacttaatgaaagcagaaactgtttcatctaaagtcgttttgttcatagtagaaggaatatcgtcattacgcatcatcataattgatatcaaaccatgaactgctgaaaataaggcgtgtgacatatgacaggcgttatcaggattggatccgtttttcttaataatctcgtacgtacactcgtaaagcatattctggaaagaagaaaattcttccttcatcattccttttccgctgcactgcattcccaatccgaacattagctgataatactctttgtttttaaatgcgaacttccagtaagcatccacaatagctttcagttgctcgtccggagcctcatattctctctgggctttcagtaattctatgtgtaaacagttgaaaccattcagcgaaatttcgtacaaaatcgcttctttgttttcaaaataatcataaaccaccggtgcgctgtattctatggcatcagcaatttttctcatggaaagggatgcccatccttcggttttagccaaagaaaaagccgcatccagaatactggcgcgtatattttctttttctctttgccgacgttcgtgcagacccatgatttttaattactaacagtgttagcaaaactacaaacttttgaggatatcttccaaacaaattttacgctttaacttttaaagtaaggttttgaagatggttttaatttggctggatgcttgaaggatgggagctggatgtatttttaatgtgttgatattttaattattgtaaaaattaatagagtttatagtcccattcaatcgatagtaatttctgagacttccatcttctcgcatctatcctcgatactataataatcaagaaattctatatctttgtaaccaaataaaaaagttatgaatactccctcaaatatgatcgaactgggtacaaaagctcctttttttgagcttccgaacccgtcaaaaagtaacgaaattcagtctttggatgatctgaaaggcgaaaaaggaactttggtgatctttatgtgcaatcactgtccgtttgttcttcatgtcattgataaattaaccgaactgtatgaagattacaacgaaagaggaattgaatttatcgccatcaattcgaatgatgtggaaaaatatcccgcagattctcctgaaaagatgattgaattccaaattgaaagaaagtttgattttccttatctatacgacgaaagtcaggcaatcgcaaaagcgtacgatgcagcctgcacaccggatttctttttcttcgatgaaaaactggatttaatttacagaggacagatggatgattccagaccgggaaatcacaaagaagtaacaggagaggatctgattattgctttcgaaaatcttttgttgggggaaccgcaggaagaaattcagaaaccaagcatgggatgcaatatcaaatggaaataatttttgactgataataattgcgggctgtcagttgatagctttgcaattcaaatacataaagctgttctttttgaacagcttttttgttttgtaataatttgaaaatgaattgtttaattttagttgaaaaagttatccacaattttatccacagagttatccacaatttattttgctaaaaacctgcttttacttttactttttcttctacctttaaatctacattcactctgttctgtggaaaatttttcatgaattcggaaggtgtttttccggtatattttttaaacattctgttgaaatacgttacgttattaaaaccacagctataactgcattctgaaatacttttatcctgtgccatcagtaaacaggctttattgatgcggtaccggttcacaaattcggtgaaagtgatctgagttgcttttttgaaaaaattacaaaatgcaggtaaagtaagattggcaagtttggcgacgtcctcaatgtcaatttctttatcataatgatgttccacgtaagtgaaaatattttccagtcttgttttgtttttggaaataatcgtgtaaggcataatttccttattcagaagttcgtaatcatcacattttgaaagctcaaaaagaatttccagcaataaaagatatcttttgtagccttcagatttcaacatcagctttagtttcggaagcatattgatatgaacctcatcatgaaaatgaattccgtattttgacagctccagaagatttttaatggatcttgcttcaacttcctcctgtggaaactgcaggatttcttccttaaactgcaaaacaatttcttcatgtggatcgatagaattcagtccaaaaccggagtgggggatattggagccaattaacaccagatctccgttcgtataattgcttttatgataaccgacatgccttgttccgctcccggaaactatacagacgagctcaatttcgggatgataatggtattcccatttaaattccgagatgggagaattgttgtgaatagtgcgaaaagagctcttttcatcggggacaacacgttcaaaagtgactttcatttagttaatcatattttgaagcctaaaataataattatattaatatagttcaaatattcatttatgatgttaaattaatgttaaggcaaatgaatatatcttagcccacaagaaattatatgaatgaaaaatttcaatattaaggcggttttatttttaaattatttcgtttttgcgattcttctgaattctgtaggaacagtaattttacagatgcagcagaatttcgggatctccaaatcttcagcaagtgttctggagggttttaaagatctgccgattgcgatctgttcattcattctggcttcgttcttacccaaaataggaattaaaagatcgatgctgatcgctttgcttttggtgagctgcatgtgtttcgtaatgccttttgccaatgcgttttggtttttcaaattattgtttacgattgtcggggtttcttttgcgttaattaagatttccgttttcacttctatcggtttggtaacggattcagataaggagcattcaagttttatgggttatctggaaggtttttttatgatcggcgtattattgggaaatgttttattcagcttattcatagacgaccacaatccgagatcgacccattggctgaatgtgtattgggttttaggaggactttcggctctgtcttttctgttcctgttttttaccagattaaatgaaaacgaagcgaaaagtgagaaaacagatttgttgggagatctgaaaaacagtgtgagtttattcagctataaaaaagtcctgttctttttactgtgtgctttcctttttgttttggtagagcagagtttccagacctggacgccgactttttacaaggaaattttaaaagttccgacttccatgagtattcaggcgggagcggttttggcgggagctttcgcactggggagatttctttcgggatttttctctaaaaaattcagttggatttacgtggtttctttctgtgtggtaggttttgccataagtattttattggttctgcctttaactcacaatattagtattgatgcgggaacgacctggttaaatgctcctttggttgtttacttatttcctttgatgggcggtttattggctccgatttatccaagcatcaactcggtgattttagcatccattccgaaatatttacacagcgcaatgtcgggtttaattgtggttttctcggcaatcggaggaaccataggatccattattacaggttttgtgtttcaggaattcagcggacagcaggcgttttacctttcattaataccgctttcactgttgattgtttcagcagttattatgaacaaattaaaaataaatcctaaaaaataaaatgaagaagcagttatatatatatgaaattcagtctctttttgatgatgtgcagagatcagaggtttttgaagatcagaagatgatgacggatgcggttcctttgtttccggtcgaagaaattaatgcaaaatatgaagcagagaagcagtcggaaaattttgatctgaaagaattcgtcctgtcaaatttcgattttttaggagctaaaatttcgattcagagagaaaatcatctcccgattgaagaacatattgaaaaattatgggatgaacttacaagaactgcttatgaagaaaaagggacgttgctgaaacttccaaaaccgtatgtggttccgggagggcgttttaatgaatttttctattgggacagttattacatcatgttgggacttcaggtttcaggaagggtggaaatgatggaaaacattattgaaaactgttcttatctcattcagaatgtaggatttgtaccgaatgcaagccgcactcatttcttaagccgttctcagcctccctatttctcgttgatgctggatctgctttttgaaacaacgaaagacgaaaatatttacatcaaatatcacaatactttagaaaaagaatatgctttctggatgaacggaacagaaggactggaatatggttcggcggtaaacagagtagtgaaaacaattcacggagatgtattgaacagatattatgatactgaaaacataccgcgtcctgaaagttatttaattgatattgaagacagtgaaaatgcaagagaagagttttacagaaacatcagaagcgcctgtgaatcgggttgggatttttccagcagatggtttgcagacggagagcatatacagactattgaaacgttgaatcttgctgaagttgatctgaactgccttttatggcatttggaaaaaacactcgcaaaatcttcatcgcttcaaaaattaaatgaaaaagaaattgattattctgaaagagcagcaaagcgaagacaaataatagatcagtatttctgggacgaaacttccggaacgtacaaggattatcatattcaaaaaaacacaaacacaccgtctgaacatattgctgctctttatcctttattcctgaaaatcgccagtgaagatcaggcaaaggcagttgcgaaaaatattgaagaaaaatttctgtatcagggaggtttggtaacgacgactcaaaacacaggtcagcaatgggattttccaaacgcctgggcgccgtatcagtggttgggttatcagtcgatgaaaaactacggatttgatgatctggctgaaaaaattaaaaacaactggtgcagcaacgtggaaagagtgtacaaaaacaccggaaaactgatggaaaaatacaatgctttagacatcgaaaccgttgcaggaggcggagaatatcctaatcaggatggtttcggatggacaaacggagtgtatctcaaattaaaaaagaattaaaactaacaaataaaaatcaaataaggctatgaaaaaaagatcgatgtttttacttgccggtattgcaaccttgtattacaacaatgtctacgctcaggaaactcctaaagattccacgagatcggcttccatcgaacaggtggttattacgggtaactctaacccgaaaaagaaaatagaatcgagtacggcgatttctacttttacagcaaaagaaatccagaaacaaaacccgatcagtgcggcagctttgttgcagcgtgttcccggttttgcggtagaaacttccggtggtgaagtaggaaacaaccttttcgcaagaggtattccttctgctggagcgtatgaatttgtacaggttcaggaagatggtcttcccgtgtttgaagacggagcattacagtttgcgaatgcagataatttcttccgtgtagacaattcggtaagccgactagaagctttgagaggaggttcaggttctatttttgcgaacaattctccgggaggtttaattaactttattaccaaagaaggcggaaacgatttccgaggaacggcaaaactggaaaccagtacttatggattaatgcgtactgatgtaaatgtaggaggagctttggttcaggacaaattattcttcaatgtaggaggtttttacagaacagatgacggaatcagaaaaacaggttttaaagccaatcagggcggacagatcagaatgaatctgaaatatgtcttcgataaaggctatgccaaaatctattataaaaaactggatgacagaaatacgttcttccttccgattcctttggtgcagaacggaaatgatctgaaagagttttccggttttgatgccaattacggaacgtacagttacagaaacatcagtcagttgaatattccacaagtaggcggaggatttttcagcagaaatttagaggatggaattcatccgaaagttgatgttttaggagcggaattcaaatatgatcttggtagcaatttctctgttttaaacaagacaagatataccaatatcaatatgaattatacgggaattttccctgcaggcggacctaaaactgccgctgagtttgcatctaagcctgtttctcaaggtggagattatgggatgaccaattatcagtattctttagtaagcaacggagcggtggtaaatccgagctacgttcagaaattaggattctgggcaattgataagcagatgaataattttgtcaacgatttgcagttcagttataagtttgataaagggaatgtaacggctggtttctacaaatctaactggaaatcccatcaatactggaactggagcaatattttaaccacagcctcagataaaccggaacttttgaatttggtagatacttcattaatgccaaacagtgtaggttattctaaaacgtacaacggagttaccaatatgtcgttcctgttgagagattctcagattcagggaagtctgaatgatctttacctgaatttagattacaacattaccgatgatcttagttttaacggaggaattcgttacagccgagatttctataaaggttacggggtgaacacgacgagcggaaatcttaacaattccggattgactactgacggaacgcacagttttgcaacaaccactgcggacgaaaatatgtctgttttaggcaataaatacacgtactggaattttgatgtgaataaagtttctttcacaacggcgctgaattataaaatcaataaagaaaatgcagtgtatgcccgtttctctaatggtttcagatcgccgaatgaggaagcatactacaacaatatgaataatttatctgttgtaaagccggtaacaaccaatcagttggaagtggggtataagtactactcaagaacgtttgatgtggcggtaattccgttctattctacattgaaaaatctttcatttaccgatgtgtattcagacggaagctcagagaacaaatttgcaaataccacgaacttaggagttgagctggaaggatacgcaagattattcaacaacgtgtttgaagtaacattcaacggaacgattcaaagtccgaaatacaaagacttcacgggaagaaatgcagacggatctacattcaattatgacggaaataccgtgagaagaatgccgaaattctactttaatatttctcctgcggtaaatcttaccaaagaatggagagcttatgtaagcatgaattactacggaaaacgttttcaggatgagaaaaatgcgcagactctgccttctttctcagaatttggagcgggaacttcttatcagttaggcaaaatccgttttgcggtggacggaaccaatatctttaataccatcggtattacagaaggtgatccaagagccggatctccatcgggagacggaattattatggcaagaccaattatgggtgctgcggtaagagcttccattacgctggatttctaaaatttatttcttcatataattgataaaaccgtcaggagtttttctgacggtttttattttcaaaagccttcatttaatgtttccactttccttcaaattcaccattgcaaaatgatccgtcgccttttgctaaaatttcacaatgcggaagctcacaagatatttttaaaagaccatcaaatgtaaaattattgttccaaacctgaatggtaatcatttccatatattttattaccgttaattttttcaaaccaacttcagtaattgatgtttcctgaatttgcagatttagtaaattatttatttctgtcaaatatggaatacattcatctgtaagttgtgtattgccttttaagcgaagatattgcagagattctaaattctttaaatattttatgccatcgttcgtaatttcagtgtcctgtaaatctaaattttcaattttactgcaatttgagacatgagctaatccttcatcattgagatttgaactgtaaaaattggcagatataagattaggaaactgtttcagataagataagtcattaaaattaattggagattcttcccatttcaatgagaaatgttcactgtttatatcataataatgattacctatttttattggattttccatttaaagattatttgttttgcaatgacattcaaggattttttttgattaagaaatgttactatttaaacattttgtcctttagccaattttctcaaatttttcaatttctctgtaatctgatctgctccttctttgtttttttcttttttcaggttttctctggcttttttgaaggattcaatataatgatcaaatactttttctttaattaacgggtcgtctacaacttcgtataatccgcttaagatccattcgaaaatgccatattgctttaagctttcatctaaaaagttagtgataccagaaaccatttctttattccatacactggtattcataatagttctaaatacagcacttgtcgcagaatagatcgacataaaccattcactaagatcgtgaaaataggtggcttccttatcttttccagtattttgagatagaattacaggcggttttgcagctcataaatccattgcttgcccataaaaaaccggacacatcaaatactctgttcagtaatccattaataaaaacggacagacctaacaaatcatactttttatcggtgagaactaattcttcatgattcggtagttctgttataatctcgtcatatttatctttcaaatcctgatggtttgcccaaaaaggaaaaagattgacaaataatgcacgttctatgatttcctgatccagttctccgccattttttgcataatccggcaattcgttacatgcttctaaatattctttaaatgattctcctgctagttttcttaccagttcttctttgttcatgtttaataattttattttaaattttaggtattagtttatttacaattattgttttgaaagaatatgagtaactttttatttatatccaaaaattttcagtccttcttctgttatttcatattccaacagtcccatattctttatgatctgttcaattttttctatcggctgaaaaaaaaattctgatgtcagtttttcatttctgttccaacgttctgtttcatgtctttcaggaatcagaatccattcaatttctttatatctgaatggtcccagttcgcttacatctccaaaacctttctcattaaaacctccaagatgaaatttgtattttctgtcgttcagcagaaacttaatatatgcagagtgaatgttaatttctgcatcctgtatttctatcagtaacctgaaccattttgagttgttcatgtaggaaacccgtttcagaatttctttctccagtttgtccatagagaacttatttattttttcgggataagctcatcaatgtattttagcatcgtttcttttaccttactttcattaaaatctatggtaacggttaaatttctttcgttttctgtaaatcttattgtattgttatccggctcttcaatctgtccgtcaacgatgaaagtgaagttttttccaaaagctgttcgggaaagctcaatattccaatcgggaacatcattaaaatttaattctcttaccggaaaaatactttcaaaatttaaaataacagagtgatctgtatgttctgtggataataatttgcaggcactccgttctctgctttgtacttcaataattccatcggtgccaatgtatttgtttaattcctgttccatatttttagttatttgtttttatgaaggttattcaatttcaatagaatgataagcaatccatcgttttaaatttccaaccatcctttttaaatgatcttcattgagaaagatatttgtccagaattcaaatctgtcgcactgcacactgatgtaatacgtcatgacagctaaacaggcgtaagataagaactttttctcttcgttattgattgttgttaccgtttcataaccctgtaaaaaactttctgcttttgtctgatattcttcctcattcaggtttgttgccagaagctgaaacagaaagtaagaaatatcaaaacataaatagccgtttccgcagaaatcaaaatcgaaaaaagtaacttccttttcattatcaatatgcagattatcaaaccagacatcaagatgtacgcttccgtatctcatttgctgtctgtcgaaagtttcgaatttaaggcttaaaaattcagataatttctccagaaaaataacttcggaattaccatcgttaaagaatttttttatcttttcaacagggtttataagcagatttttcgcatcataagaaatcttgttcagttcaaaatgctctgacgactgatgaactctggctaaagcctgtccgatcagaaaacttgtttcaggtgagagttttgccgttttatgcctttcgcataagaaaataaaaccccgaacctttttccttcggtgcttcaattttctgaatatagtcgccgaatttgtctgcaataggaaaagcaacctgccggtttgcgtcttttaaatgaagaagaagctttagttcttcctcaatttcagattttgtccgccaatgatgattatacaccctgaaaacaaatttcttttcctcatcatgaataatgtacaaatgattcatggcaagccgaaagatgtggcactcggttttagcgctcagtccgtagttttgttgaataagatatccgagatacacgggatcaagcgtactgtttatagcagggaatttttctgtcattaattctttatttctgtttaatcgtgagtgaacagtactttatatgaaagaatcttgtttgtaatcaaatgcaaatgaaggtagtttaaaacaaaactgtttgtatctaaactctcttagctcaccccacactcaaacactcttacttaaaaaacggattatactccttctcaaacccgattttcgtaggatttccatgtccggagaaaacctgagtgtcgttatccaaaatgaaaagtttggtcttaattccgtcaattaattgttcgtagtttcctttataaagatcggttcttccgatactgccttcaaacagaacatcccctgaaataatgaacttctgattttcgttatgataaaccacacttcccggagaatgccccggaacatgatagattttaaacttttctccgtcaaaatccagttcgtcaccctcattaatatattggatttccacatgaatatgatccagctcaaaaccaaatctcatcccgccgatctggaacatatccaacacttccttatcttctctgtgcatcagaacaggaactttatacgtatcaaaagcccattgtaagcccaaaacatgatcaatatgagcgtgcgttaaaagaattttttcaattttcagttcattttctgaaatgaaactttcgatcgctttggtttcctgtccgttcatatttccgggatcaaataaccatgcttttttattttcattataaaggatataagtgttttcgcttgcaaaattgaatacgaaactatgaatctgaagcatattctgaatatttttttattaaaacaaaggtagctacaaaagtttttgtttaaaagttttaataaatttttaattcataaagatccccggattgtatgtttaaaaacgatttttcgttatcttcgtcataatgaaaacattgcagctacttttactttctctgggcggattggtttttggacagaacatccagagcattcaactgttcaatccacagaccaatgacgaaacaccggttattaattttaatcagcagttggttttaagtttcgatgatcttaccaacgcaagtgaaatctacagatacaccataaagcattacaacagaaactgggaagacgataatctgttttttaccgagtttgccaacggaagtttaaatggtttgctggataaatttcagtactctttcaacaccctgcaatcgtacacccattacacgctgaactttccgaatgaaaaaatgcagccaaaaatttcaggaaattttgaactgatcgtttataaagattctgccgataaacctctttttaaaagaagattttatgtcgtggaggatgcggcaactttagctttggggatttcaagatttgctgatgcaagaaaaattgatgccaaccaaagggtagaagtgaaagccgttccgaaagggggagatttagcctcgaatgtcaattccatgacgctgaatgtaatgcagaacaataatcctaatgttacaataaataatttaaaaccaagtgccacattggggaaccagcttctttttcagcagttgtcattggtgtttcccggaaataacgagttttattattttgacaataaaaatatgaatatggcggccgacatggttcgcgcaaccgagcagttggaaggagtcaaccagacttatcttcatccggtatgggcttttccgctgaattaccagtatcagccggacgtaaacggagcttggtattatcgaagaaatgatctgggaagagaaagagatgcgacgagggaagcagattattcatgggtgcatttttatctggattctgaacctacaaacaaagaaatttttgttttgggaggttttaataattttaagccaagtaaagaaaaccagatgcagtatgatgaagcttcaaaaaaatatgtagcaaaaatatatctgaagcagggtttttacaactacattctggcaacaaaaaatcctgacggaacgctgaattttggtgaagtgaacgggaatttctggcagacggaaaacctttatcaggcatttttatattatgctcctttcggaagaaactacgacggattaatggggtatggtgaattcagaacgccggtgagataatcttctcaatgaaaagaatatttctgtcactttccatttgtgttctttctttatcatgtagaaaagaatatgacgttaatgatttcagtggaaatttaaaaccttatcttgaaaggctttctaaagagaaagcaatccctgtttctgatacagttgccgaaaattttctggaaagaaatacatctaaagaagaattgataaaactgatggatgcgaagaaaccgttgttaagagtggtggcttacagagccattatcaacagaagtgaacctgaatattttgatctgctgatcaaccatctaagtgataccgctaaagtagcatggtggtattatgaagatgcaggaagctatttttcagtttcagatttaatgataagaaaagcttttgataaaaacggattgtctcccattcagaaaaaagtattgacggagagggttttattagagcattcttatttagatatttccaactggatgattcaggatattgatcctgatgaaaaatattatcatttgattaaagaacgggcaaaaactaaaagtaaggactgtggcaatcagctaacttcatgctatgcattaagtaaatttagaaagaaacaggatggtaagcttttgctgtctgtttttgaacaaaatattaatggttattgtctggagaatatttttaaaagtatcgagatatttccggatgctgtattttttcctttattaaaaagttattttcaagataatattcaagataaactctcggaaaagaagaacttagacaataatgtgctttattttgtaaaagctgttgctgcctataaaaattcagaagctttggaaattctaaattatatagcacaaaataacacctatataaataaaggattctggcctcctgctaacaaaacgtatgttctgaaagctcttaaaattcattacactcctgtttatgatcctttaataaaagaaattgaaaaagaaatgaatccttgtgatttgaaatcgttgatttctgagattacaaatgaaacacgagcaggaaatcagcaaaaatggtaaatctataattaaaaaacctcacagataaatccgtgagatttgcatataataatagtctggaagttgcataaatctatgttttgaatacggctgtaatcagaatgtttttttcatcttcaaaaagataatgaatgtttacgggatagccctgcattgtttcaacaagagtttcctgacatctttttttctctttttctgaaattgcgtttacacattcttttagttcttctaaaaaatccatgcctttattttgtttttcggcattaaaaactctcataaggagtcttatgtcgtttttggcgatagaagagagcaatatattcattttaagcacaaaactttttcagctcagaaatgttttcgtagaaatccagtttggttttggggttttccttatgaaactgaattctgtatagaatttcatccatgcagaattgtggtatttctgctgttctttctgtctcaaaattttctatcatttgtgcaaaagcttccagcatttcagaatttaagttctcaattttatttttcagaatttctacagttgcattcatcatttctttatttaagagattgaactttttatttgatagggtaaaggtaatgaaaaattattttattttaagaaaattatttaatttttaagggggggtgttttatttatttactattttttttatcattttgcatttttttataggggtatttgtttattttatcgattatttgtttttgtagaatagtgaagtttttgtatataattcaaacaactttgaattataatgcactacatagtgaaaaattttaattcaagaatgcatgatttatattaaatattttaacataaaatctgttttgagataaaattttacattaataatgttaattgttataaaatcgtaattatgattttttctgtgatatatattttctattgaataattaatatttatttcgttaatttggtgtagagtttatgttaattaaatttaaaaccattaaatatttattatgaaaatgaaatttatcctagtgtcaagtgttgctgtatgctcttttgttttcgggcaaaatgttccttcaaaattaattccggcgaaagacggattgcatgcagattttatgagattcgaaaaagacagacctgctttccagggaagtcctgttctgttcgatgaagcttcacaaagactttctcaggctcaaggtcgtaagttgggatttgaaaaagatcagttgggatttgaaacacacagattccagcagaccatcgatggtattcctgtagaatacggaatgatggctgtacagacaaaagacggcaagattgtaggagagtccggaaaatggatcgttaaaactccgaaaaatttagaaaaaagcgcaaaaatttcagaaaacatcgctttacagaatgcgatggcatttgtaggagctgaatcttacaaatggcagaataaagaagaagaagaattcattaaaaaagaatctaatgatgccaatgcttcttttgctcctaaaggtgaagttgtttattactctgatccgtcagatgaaaaaatgaacgacttaaaattagcctataaatttgatatctatgcagagaagcctttaagcagacaatatgtttttgtagatgcaaaagacggaaaagtattgggggttgatgcaatcattcatgaagtaaacgcaccgggaacggcagttacaggatacagcggtacgagaagcatcgtatcagattcttacaacggaagctacagactgagagaaacaggaagaaacggcggaacagcagtgcagacctttaacctgaaaaaaggaaccagctacgcttcagcagtagattttacagatgcggataatacatggaataatgttaatacaaacaaagacgagtatgcaaccgatgcacattggggtgccgaaatgactttggattatctgtacacaaaattcggaagaaagagtattgataacaaccattttgcgataaaatcttacgtgcattattctactaactattttaatgcgttctgggacggaacgagaatgacgtatggtgatggaagttcatctaccaatggaggaaaacctcttacagcgttagatgtttgcggacatgagattgctcacggaatgacttccaaaacagcaaaccttgcttaccagagagaatccggagcattaaatgaaggtttttccgatatctttggaaattcaatagaacgttgggcaagacctacacaaaatagttggaaattaggagaagatttcagctacgtgatcagagatatggcaaatcctaatgcgtacggacagccggatacttatcttggaacatactggaagactacaacgacaacaggttgtgtaactccttcccaaaccaatgactattgtggagttcataccaattcgggagttcttaatttctggtattatttattagtaaccggaggaagcggaaccaatgacaaaggatttgcttacaatgttacaggaattggtctggataaagcagcagcaattgcttacagaacactgactacttatttgtcttcttcatctactttcctgaatgcaagaacatattctcttcaggcagcagcagatttatatggtgcaggaagtgctgaagttactcaggttaccaacgcatggaatgccgtaggtgtaggaggcggaacttctgcagcaggaaaaacagcggtttcagatgcattgttatacaccatcagtccaaatccggcaacagataaatttaccgtttcattcgatggtaaagaaggaagtggagtagtagaagtaatgagcttgacaggcaaaagagaaatttccgagaaagtgaaattaacagacggagcaaacagagtggaaattcagcttccgggtaatatgcttccgggaatttatgtagtaaccgtaaacggacaaaaagcagggaacttaataaaaaaataatagtaccataatattttaaaagcaagaccacagaaatttttctgtggtcttctttattgttcttgagatttaaaagggactacaccagataaaactcatgaagtttttcctcgcaaagtgtttttaccacttcaatccatcggtcctcatcattaagacacggaatgtaatggaaactttctccaccgccgtgtaaaaactgctcttttccttctacggaaatttcttccagtgtttccagacagtctgaaacgaaagccggacagacaatggctaggttttttactccttttttagggatggtttccagtgtttcatcggtgtaaggttcgatccatttatcttttcctaatctcgactgaaaagaaacaatggttttttccttcggaagattcagtttttcaattaccagattggttgttttaaaacattggtgacggtagcaaaacgtatgactcggattgctttctctggaacagcagtcgttcagattacatgttttcgtaggatcggttttgtaaatatgtctttccggaacaccgtgataagaaaactgcaaagcgtcgaaattttcaggaagtttttctcttatgctttccgctaaacagttgatgtaaatatcacgatcgtaaaaaggctgaatataattgatctttaccttcggaaacttctgttttcttacttcttctgctttttccaccaccgtttctgtcgtgctcatcgcatactgaggatacagcgggaaaagtacaatttcggaaactccctgatctaccagtttctgaattccggcttcaatactcggctgtgcatatctcatccctatttccacaggaacatccaccactttctgaagtttcttctgaattttttctgtgatcacgataagcggcgaaccttcgtccgtccaaaccgttttataggcttccgcagattttttcggtcttgtgttcaggataattccctgtaccagaagtgcacggaaaaaccagcggtaatcgatcactttttcatccatcaggaattcatccagatattctcttacatcatttactgccgtagatttcggcgaaccaagatttactaataaaattcctttcataaaatataaataatgagtaatggtaatgagtaatttaatagagcttattactgattacttatgtttttatccgtttacagcttccactttttctactaaatccggaacaaactgtttcaaaatattttcaattccgccttttagcgtagctgttgagcttggacatcctgaacaggcaccctgtaaaagcatttttgcggttttgttttctttgtcatattccattaaagaaatttttccgccgtcgttttctactgcaggagccacatattcatttaaaatgtctgaaattttctgttcgtcgtctgtatattctctgttgatgattttttcaaccggattttcatgcttctgggcttcaatatttgaaatttcgcctccgttttgcaggtattctgcaattaatgcacgaaccgtcatcattacctgatgccattctacagaattatctctcgtaactgccacaaaattatcggaaataaaaacttctttcgcaaaatcgaattcattgaaaattgcctgagccaaaggaacaccttccgccgcgtctcttgattttacctctacaaaaccttcaagcagcaacttgttcgaaacaaatttcattacattcgggttcggagtcatttccgcatagatctggtacatttcttttttcttctgaagataaattctagggtttgcaagcaattcgtcctcaattacatttttaaggctttctgccacgtgttcccattctaccgtatcctgttttgcaactgctacaaaatttgccgtgatgaaaattctttccacaaacggataattgaaaagttcctgagcaatcggaatttctgaaatatctgaatctctgtccaactccaaagatcccggaatgagattgtaatctgctacaaatttcatcactttcgggttttcggttggctctataagtatcgtacgcattttttctttaaatttgagatacaaaaatacgcaattagaaataagaagccggaagttgggagttagatttttgctatcactgtaatttacaatctatgatttcaatcgatcattttcaacttgtcgcattataaaattttcaaaataaaaaatatggcacttataaaagaacttttagggaaagtcccacaaataggagaaaatacatttttagcagaaacagcaaccatcattggagatgttacgatgggaaaagactgcagcatttggtataacgcggtgattagaggagatgttcactacatcaaaatggggaataaagtaaatgttcaggacaatgcaatgttacactgtacctatcagaaacatcctctgaatataggaaacaatgtatccatcggtcataatgctattgttcacggatgtaccattaaagacaatgtgcttatcggaatgggagcaattgtaatggacgactgtcttgtggaagaaaactcgatcattggagcaggatctgtggtaacgcagggaacccatgtaaaatcgggagaagtttggggcggtgttccggcaagaaaaatcaaagacatcaattcgcagcttctggaaggagaagtgaacagaattgcagataattatgtgaaatattcttcatggtataaagaaaacgtgaagaatgtagaaggataagctttaattcaatgatggatggtgaatttgcttcgcaagtaaatttttcacagtaaattcaaattcataaaaataaaaagcattgctgaaattttcagtaatgcttttttgtctttagtgaaattcctgaaagaattttatcatagtcctttaataaatcagttcggctttaccttttatacatttaattgcagtaggaggattcaccatcatacagtcagacataattccgtatttctggttaaatgcttttactttttcagtataatcatcaattctgcttagaatacttttctccatttttttaggataggcaatgtacagttgaggtccgccgcaggattttgcgcccatcggagcgaaagcccattcagttgcatccgtacatttttctttcgtaacttcagattcaatggaaacccgaattctgtcgagctgtgcctgatcgtatttctggctgctttcatcggcaggtctttctgcgatatcctgaggaagattggcatttgcttcttttgcggttccgcaggaaacaaatagcaccgaaaagcttaataatacagcagaaatataagaaagaggttttagcataattacttttttctgtttcaaaattttcaaaacttatgccaagataaggattttaagtttcatttccgtaattttgacaacgatgaacaatcatttttttgacttaatagaacataccaaccgaagcgtatttttaacgggaaaagcaggaacaggaaagacgactttcctcaacgattttgtaaaacgtaccagaaaaaaacacatcgttgttgctcctacaggaattgcagccattaatgcaggtggcgtaaccattcattctatgtttggactgccgctgagaacgtttttaccgaccacggaaagaatcgatacgagtctggcaaataatattgcagacctgatgcctcatttcaaatacagaaaagataagcttaaacttctgcgtgaagtagaagtgattatcattgatgaggtttccatgcttcgatccgatgttctcgatatgatggatttttctctgaggtttatccgtagaaataatcagcgttttggaggggttcagatgttgttcatcggggatttgtatcagcttcctccggttgtgagggatgagcatattcttaaaatgtactacaattcgcctttcttttttgatagccatgcgattaaggagattcctttgattacgatagaacttaccaaagtttaccgtcagtcggatgaagattttcttgccattcttaatgcgatccgagacggagatactgcgaatatagattttgaaaggctaaatgaaagatatgatccggattttaattccggagatgaaccttatgtttatctctgttcgcacaataaaatggcggacgatatcaatcaggaaaagctcgacgaaataaaagtaacgtccaaaacctacgaagcaaaactttttggtgaatttaaagaaaaccagttcccgaacgaacagtttttagacctgaaaatcggagcgcagatcatgtttatccgaaatgatatttccggagaaaaaagatatttcaacggaaagctgggcgaaatttctgctttggatgaaaacgagattaaagtaattctggatggaagcgaaagggaaattatcgtaaagcgtgaagtctgggaacagaaaaaatattttctggataccgataaaaatatcaaagaagaagttttggggagtttcgaacagtttccgataaaattagcatgggcggttaccattcataaaagtcagggtttaacctttgaccgcgtgattatcgatgccggaaaaagttttacagcaggacaggtgtatgttgctttatcgcgttgccgtactttggaagggattgttctgaaatctaaaattacacccgaagttatctttaaagacaacagaatccttcattttcattccgatacagttgccaatgatcaggttgataagattttaaataacgaaaaatacgattacagcatcaggaaagtgcttcgtgcagtcgattctcaatggcttttaaaggaaattgaagactggaacaatctttcaatcgtaacgaaaagtctggatcatcttaaaacgaagcaattatataatcagttaaaacctgaaatcgtcaatctcggaaagattttcgaaaaactggaaagggttatttcccaaaaggtgaataatttcattgagcagaaagaagaatggtctgaaattgaaagcaaaaccaaaggtgcggtgaatttcttttttaccgcaatcagagataaggttttcagtccgctgaaagatttttatgctgaaattaaaggaacaaaaggtctgaaacagtataacgaagatttccgcgtatggctggaagatattgaggaatatttaaacagtttaaaggaaattcatttgctggaaacaaaacttctggatgagatcaataacaaggaagtgagcatgaaagtggcaaaagttccgtctcaggttctcacgttccagttgtttgagcaggggaaaaccatcggggaaatcgctctggaaagaggtttggtgaaagaaaccgtgatcggtcatctggcgaaatttgccgaacagggattgctcgatatttcaagagtggtcacttcagataaaataaaagcctttgaagatattttctacaaagatcccaaagaaactttaacggagtggaaaaatattctcccaagtgattttgaatttaatgaaatccggattctgatcaatcattttaattatctgaaggagaaaaatcaataaaatattgctgatgtatcagccacaaacctcacaggtttttaaaacctgtgaggttttttttatcataattttttttttgaagaataaattcagatgaatttttgtatttttaggtgttaaatccttatcacaatgaaatatctatttacttttttgtttgcattcttgctgaatgcagatcacgattccaaattcaattacgatctgctcattggttcatggtcgcagaaatccattgcgaacagcaattctacgggaatattcacctttaaaaaagacagtacggcaagtcttgaaatgatcgatcaggcttccaacggaatgattggcggaatgaccggtccttataaaattgaaaaagccaaaggaaatctgaaaattacgttactgggaaaagaaaaaacatttgaaattcaggaactgactaaagatgttttggtaattcagaataaaatggaaggtaaagaaaaacaggtttttaaacggtacattgataaatagctttaatttaagattgtcataaaaacacctttatgatcagtcactacatttttatccacaaaaattccgtattctgtatcgtctgaaaaacctttcgggattataatgtgatcaatattttcttcaatttctgaagttacagggatgatatttaattcttcaaaaagattttttaaagtttcagttgtgctggaactgattgaaaatcgttcttcaccttttcggaaggatgtattaaaatcgccaatgataaaaatattcttgttctctgcataaatttttcgacagtcttgaatcgtattctgtaattcgatatcaacaaaaggttttcggttaaaccaagttccgataatggtgcagtagaaaacaatttttcccaattctgtttcaaattccaaagcgaaattggttttatcatccgtcacagcatattttttcgaataaggaattttagagtacaaaactgtccggaaagctttttctccttttaaatattccgaataattgagattttcataaacggtgttctcaggaattggcgaacagagatatttatacgggaaattttgaagatcaagattgacggcttccgtgagaataaggaaatcgaaatcaaactgattaagaaattccgcggttcctgaaaatttcttttttcttgcccaatcgatgttgagggttgcaattttcaatagtctctgtttaaaattaatttccgttgattgttgtcataataacttgcatgaagacttgtatctttgaaagatatttcttgattttctatttcattaaatctttgcttatcggtttttgcaaaatcaatcagcgtatatgtattttcatctaaaacagtaaaatcaacgagttttaaatattcaggaacagatttcctgtcgatcataatctttccgccgccaagttgatgtctgtcctgtccatttttcttcactccggaaacccaatattcttcgcccgtttcaatatcaaaatgatttcccgaaatgccgggaattttaagttttttaagagccttattattgaaatatatcgtttgtccggattttgaaaattcaacccaaccaatccacgcagatccgtgatgaccggaagatttgttttcgatatatcttatttttgatttcatgttttaattattggtcttatctttttaatttctcaaagtcatataaagtaatgaaatcaattttatgaccccatatttcattcattttcgccttgggaaaaactcctgaaatagaggtgttttcaaattcatccttgaaataatattttatatctgctttatagattaaagatgtttttacattgctttttaaagataaaagagatttccagtctttatcttccttcccttcgttatagtaagctcctgtgaaaaaaacttcaatcgtattttctttaatatcttttgagaaaatattcttctccttacttaaaggataatattctttataaggttccatgctcaaaacgcggtattcatatttattgccattttctttcagttctaaaataatttttgaacctaaaggaaaagtaaatgttccatattcggtgggaaatgtagtaggaatattcagttttttttgagaaaatatttttcctgtaaaaattaaaatgataataagaaataagagttttttcatggttaaattttgaattgaaatcaataccaaatatacaaaaagtgattattcaaaaaagcgatttaatattagcctgatttcccatagtttttctctgaacctcaccattaatcctatcgattacaaaaagtaactaatgcagtttattagtcttatctttgttgggtaaaaatttaaaataatgaaaccgacaaaagtttatgaaatgcttttgtctaacaaaatatcccgatatgaaaaattttgaaatatcagtattggatcttgcccctgtaaagcaggggaaaactgttcatgatactttccaggacagcttatctttagccagccatgctgaacatttagattataaaagattctggcttgccgaacatcacaatatggaaagcattgccagttctgcaacctccgttctgattggttttatcgccaacggaacaaaaaaaataagagtaggttccggaggaattatgcttccgaaccacagttcattagtcattgccgaacaattcggaacccttgaatctctttttcccggcaggatcgatcttggtttgggaagagctccgggaacggatggtttaaccgctcaggctttgggaagaaatcctgcaatgatcaatcagcagtttccaagacagattttagaattacagaagtatttttccaaagaaaaccgtgatgctttggttcgtgcaattccgggagagggactggatattccgatgtatattttaggttcgagtacagacagtgcttttttggcagcagaattgggacttccgtatgcttttgcggggcattttgcgccggagcagatggaaatggctttcaatatttacagagaacattttgaaccttcaaaatatttagataaaccttacataattgcctgtgtcaacggagttgcagcagaaacttcggaggaagctcataaaatgtccacaacattgtttcaggcttttattaatattatccgaaacgacagaaagcctttttcaccgccgattgacgatatggatgacatctggtcgcccatggaaaagtctatggttttgcagaaactgagatatacttttatcggaaatcagagtgaaattgaagaaaagctgaaaagttttcaggaaaaatttaatgtggatgaactgatgattaattcccacatttacgatcatcagaaaagactggaatcgtacagcattttcagaaaagccagaaactccgtatttaacgaataataaagagtttatattattggcgatgcttatttttatgagtatctttgcacaaatttaaaaagtaaaaatgtctgatattaagttaaatactattccagaggcgatagaagaccttaaaaatggtaaaataatcatagtagtggatgatgaagacagagaaaacgaaggcgattttctttgtgcagcagaactaacaacaccggaaattatcaactttatggcgcttcacggaagagggcttatctgtatgccgcttcccgaaaaaagatgcgatgagcttggtcttgaagtaatggtaagccgaagcagcgatccgaaagaaaccgctttcacggtgtctgtagaccttttaggaaacggaacttccacaggaatttctgcaagcgacagagcgaaaaccattctggctttgatggatgaaaaatccaagccgacagattttatgcgtcccggtcatattttcccattgagagcaagaaaaggaggtgttctgaaaagagcaggacacacagaagctgcaatagatttaacttgtcttgccggtcttaaagaaggaggcgtaatctgtgaaatcatgaatgaagacggttcgatgtcgcgtttgccggagctttatgcttttgcacagaaacacgatatgaaaattgtttccattgaagatttaattcattatcagcttaaaaaaggaaatcttattgaaagaattgaagaaagaaaagtaaaaaccgcttacggagattacgatttcttcgctttcagagaaacttctaacgatcagatccattttgctttaaccaaaggttcgtggacggttgatgagcctgttttggtaagagttcagtcatcagattcttattttgatgtgttaacgagattaaataacggcgaaaaacctcagttggaaaaagtaacctcaatggtgaatgaagcaggaaaaggagccattgttttcattaataatgtttccagctctgaaaatacattaagaaagcttcaacagttccttaattatcaggacggacaacagcaacatccgactttggcattcaactacagagattacggtatcggaacgcagattcttaaaaatctcggaattaataaatttaaagtaatcacccagaatcctaacgtaaaaccgcaggttggcggatatgacgttgaggtaacggaaatggtacaactataatgatgaatagtcaattgtgagtaaactttgttgtcaatttttttgatacattttcaattcacttgctcaagcaaattgacaattcacattttacataaaaaaatggcttgagaaatcaagccatttttatttcgtcgaaattcctgaaaccgttcagaaaatctttgatgttcattctcttttttccttcaagctgtaattctgatggaaaatattctccgtcttgggtgtagatcttaaattcatttttagaaatttccagacttccggcagtttttccatgatctgaaatttcaaattttccaccgaaaattttaagtcctttttcttcttcgcctatttttaaagtggtgaatgccgcaggataaggagacattcccaaaataaactgatgaatttctttcgaatttttcgtccagtcgattcttgtatcttctttaaaaattttaaacgcatttttcggatgctcaacttccggctgcggtttttcagtaattgagttttctgccaatccgtctaatgttcttaccacaagctcagagcccatttccatgagtctgtcgtgaaggcttcctgcattttcatccggtaaaatgggaagttcttcctgaaggagaatatttccttcatctattttttcattgataaaaaacgttgtagctcctgatttttcttctccgttgataattgcgtaattgatgggtgctgctcctctgtaatcgggaagtaaggaagcatgaaggttgaatgttcccattgttggcatttcaaacaaaactttcggcatcattctgaaagcaaccaccacaaaaacatcggcttccagttttctcaattcctctaaaaattcaggatttctcagtttttccggctgaaaaacaggaagattattttctacggcaaaaacttttaccggagactgattgattttctgtccgcgtccgctcgctttgtccgcaaccgttacaacgcctacaacttcgtgatgagaatgatgaatcgcttccagagatgctttggcaaactccggagttcctaaaaatacaactttcaatgatttcatactgcaaagataaggtctttgaggaaggattgaaagatttgattttaaaattgagagttaagatcagaaaaatgtaatgctgagcttactgaagtatcttaagccaaagcatacgttctgaaattcagcatttttacttttccggtatccagaagaaaaattaaattttccagaatattctctttggaatgatagctcagctgaatagaaagttcttcaatcgttgccggtcttttgccgagcaaattgaggatctgctgggaaatatttttcccgaaaatcgactgtttgtttcgttcacataccgaacattgcccgcagtttttagcatttttttcaccaaaatagttcaaaatgagcttcattttacagtatttatcatcttcgatgtaaaatttcatttcttcccacttctggattttatttttctgaatatgttcaaaaagtttccagtacacagagctgtttaatctttcatctcttggtttcaggaattttatgcttgataaagcaccgtcaatatattccacatagcctttttgctgaagttcttttaatcgttctttgattaattcgacactggatccgatttttccgcttacctgctgttcgctgaacatcactttatgtgtagtaatcccggaaatggtacgaagcatcagttctaaaaaataggcatcttttctgggcaactgatcaatttcatgggcttccatcaataactgaagcgatgaaagacttttatgttcgttgaaataaattatttcctgattgtgaagaaaattgagaacatttctgatcttcgcattggaaagtttcgtgaaattataaattccgttgatattcagttgaaaaactttttccggaagctcgaattcggcaacctgaaaaatagagtagaggtaagtaacgatctttaaaaactcggctttattgggaatctggttttttaaaatttggtcaaagtttaaaatttcctgcttattccaaagcagaaatgcgaaactttcttttccgtctcttccggaacgtcctatttcctgataataattttcaatggaaggagcaggagagtagtgaagcacaaaacggacattgtctttatcaattcccattccgaatgcattggtggaaattaagacatgattattgcttctgttccatacttcctgtttcgtatttttttctttcgtggataaaccggcgtgaaaataatctatatttttaagctgattttttttcagaaattcactgaggagttcggcttcttttcttgttctcacataaacaattcctgcttcattcgagaattttaaaatatcatatactttctgaaatttatccgaaacttcttccatgaaaattttgatgttgtctcttttaaaacttttctgaaaaacctgcggattttttagttccagttttaattttatttcctccaaaacttttggcgtagcggttgccgttaaagccagacatggaattttaggattattttttctgaattctttgatattctgataactcgggcggaaatcctgtccccattctgagatacagtgcgcctcatcaactgcaatgaaagatagttcgatttcctctatgttctggagaaactgcttgttggtgattcgttcaggagaaacatacagcatttttgtaagtccttctttgcatcggtcatagatattttctgcatcatactcatccagttccgaagaaagatattctgcttcaattcctctcgatttcaattggtttacctgatctttcatcaatgccaataaaggagaaataaccagacaggttccttcctttaacaaggcaggaagctgataacaaagagattttccggctccggttggcaacaggacaagagtatctttttcgtttataacagaatctataattgcttcctgagaatcgcgaaaaccatcataaccccagaaatgtttcagggttttaaattttagctcttgaaaatcttgctgagaaatcataggataaaagtaataaaagtattctgacaaaaaaagccacgcaatgcatggcttttatatatttaataataattttttattatttagcttcgaagtaaactcttctgtttgctctgtttttccattccggacattttgtagcagggtcgcattcaggatatttaaggtctttttcacctctacctactgcgttaagtttaccagactgaactccgtttttaattaaataatcttttacattgttcgctcttctttcagaaagtttttggttgtatgcatcagaagctcttgtatctgttgctccaactactgtgtaagatccattagaagaattaatgtaatttacagcgttgttaagaattggagtgttagaaggtaaaattctatctgaattcagatcaaattcaattccttccaaagttcttgtagaatcaattacaggtccaaccggagttgtagttgtaggacaaccttggttttccactggtcccggaacggttacacatttatcatatagatcgattacaccgtcaagatcagtatcaagagctacacctgcaccgtccactcttgctcctgcaggagtatcaagctgtctgtcccaatcgtcgcaaacaccgtcgttatcaagatctccttttttacaaacttcgatatcctggtttttgttagccaaaacatctaatttataatagatctcctgaagtggatcgtgccacatcaaatgagattcgtgttttccaagttttaaagaaacccctaaagtagcgttgaagaagttatcagaaacctgctcttcacgttggttgatcgtgctgtatttgtctcctccgccgtcaaattcatcatcaccggtaacggcatacattactctaccttcgatatcgattcttctgtttactttaaatttcaaaccggcacctgcctgagcaaacatagatccaagttgaaacggcttaatttccgttaccagtctttgccctttatcatctttctgataagctctgtaggctaaagttccgatacctgcataaccatgtaaagcccatctgtaaggagaatggttatccactcttctgaataggtttgagaagttaatgtctcctaataatgagattgcatcatattgcgttcttgcagctacacgttgatacgctgaagcgtcagaaggcgcagaatcttttgtattaaaccatccctgtcttgtttctcctctgtcgtattgtaaattaagaccgaaagcatgagtaatggctttatcaatacttacatatgcagaataaccaaaaaggtttttaccgtttccgctttttatagatgttaagtctgcagattgaactaatggtacaccagcaccgaaagagattgcccaatcgttaaatcttttagatttattggtaaacggggaaacatttgcagagcccgaagaaaacgtatttggatattgcccgtttgaaactactgcagttgagtcctgtgcaaaggcaactgtaggaacagtaagtgctaatgcaacaattgctaaacttaatttcatagtgtattttttatttagttaattaaatgatttagttataattatttggctgtagtaggacaaccttgattttctaccggtccgggaaccgttacacacttatcgtataaatcgattacgccatccagatccatatctaaagcaactccggctccgtctactcttgctcctgcaggagtattaagctgtctgtcccaatcgtcgcaaacaccgtcgttatcaagatcacctttttcacatactacaagttctgtgcttttgttttccagaacattggttctgtaatatgcttcctgtaaaggatcgtgccaagccagatgagaattgtgttttcctagtttgaaagaaacacctaagttaactgtccacgcattatcagatcttcttttatcaagcatattatactttgatactttagaagtaacatcataatctgcaggacctgcgttaccaccaccgtcgaattcgtcgtcaccactgatgatgtacatcgttctcgcttcaatgtctataagttttgaaactttatatttcaaacctgcaccaagctgataataaattgagttgatgtctaacttttggttaatgaataatggaattcttgcaggagtagtgctccatctgaattcattattatcatataaagaagtattgaaattcattaaaccaacacctgcataaccatgcaatgcccatctgtaaggagaatgattgtctactcttcttaaaagattagaaaagttaacatctcccattaaagcaatctggttatatttcgttttggcttttgccactccggcagctacacctgcagctccttcaagctgtcctctctgatttgtttctcctctctgataaataaggctgattcctacaacatgggtaatctgtttgtctaaactcacatatgaattgtagccccagttgatttttttatctgtaatagacttcagatcggagtgaaccataaatgcagcacctccacctactgatacagaccagtcgttgaatctttttgcttttgtgtcgaaaggttgaacattggcagaacctgaagaaaatgtattgggatacttatcatttgaagtaacagctatactatcttgtgcgtaagcagcaataggcaacgtagccaataataataaacctaatttcatacaatatgttttatgttttatttgataaaattgcttaataatgtttttgaaaattctctttcaaaaagatgctttttgtgagggatttccaatctttctgagacaaattttaattcattataggtaacgatatctatgtctattactctatcagaatatcctcctgaagctttagaatcgttagctcttcccatttctttttcaatacttttaacaaaatcaagcagttgaataggcgaaagacgagtaaacattatcagtgcaatattacaaaaaatattagaactggcaaattctacgggctcggatattaaaaattcacttaattttaatatttcatttccaccattttgcagtttttttatagcggtttcaagattttttttttgatctccaagattacttccgagtaacaaaacgactttatgttgcgacatattgtaaaatgattgatttatgaaaagcttttttaaaaatgtactggcaaatatagtggctattgtcattttaggcgctgtgtttttcttcttttttatcatcatgctggtgttcagcgcaatgggaagtgagaaatctgtggttgtaaagaaaaattctgtccttacgattaatttaaaaaccaatataatagacagtcctacagaagagcagaaaggactttttaatattagtgaacagacaaaaaatgtgttgatttatgatgctattgaagccatcgaaaaagcaaaaaccgatgataatattaaaggaataagcattgaagccgattatttaaatgcaggaattactcagattgacgatctcagaaatgctattcaggattttaaaaagagcggcaaatttgtttatgcttatggaaatacggtttctcaggctgcatattatttaggatcggttgcagatcagtattatcttaatccttcgggaatgatcgagcttaaaggtttggcaacagaagtcgctttttataaagattttgccgacaaatacggaattgggattgaagttatccgtcacggaaaatttaaatctgcggttgaaccttttttaagaaatgatatttctccggaaaataaagagcaattaagcacacttttaaatgatatctggaaaaacacttcttcaagaatggcggtttcaagaaaaatagatacggcacagttcagaacggtggtcgacagtttgtacggaatgatccctgatttaagtttaaagtataaactggcggacaaattaattcagaaaacagaatacgatcaagtaattaaatcgaaattaaatttagcaggagacgataagctgaataaaatttctttaggaaaatatattgcttcttattctgatgatgaaaaatcgggagacagagtagcggttttgtatgcttcaggttctattaacggaggagacgattataacgatatccattccgagaaatatattaaatacattaaagagcttcaggataacgataaagtaaaggcggttgttttcagaattaattctccgggaggaagtgcaaatgcttcggatgagattttattcgaattgcagcagttgaaaaagaaaaaaccattaattgtatcttttggtgactatgccgcttcaggaggatattacatcgcaatggcggcagataaaatttattctgaaccaaacacgcttacaggatctatcggagttttcggagtgattccttatttcaaagatattgccaataaaaacggaatccgttccgatattgtttctaccaatgccaattcccaatattattcttctttaaacggagttacgccttacggagtaagcttaattaccagaagtgtggaaggtacttataaaagattcgtgcattttgtaacgcagaacagaaaacagacgtttgaacagatcgacagtgtaggtggaggaagagtatggagcggaaccagagccaaacaaatcggtcttgtagatgaattgggaacattgaatgatgccgttaaatttgccgctcagaaagctggtttaaagtcttacgcagtttcttcttatcctaaaagcatgacgcctttcgagcagatttttaaagatcttaatgaagatgatatttcggcaagagtagtaaaaagtaaaattggaaaagcaaattatgaacttctggaacagatcgtagaggaaagaaaactgcagtctgaagtaaaaatggaaatgccttaccagattaaaattaactaactaaattatatattgtacaaagaaacggcggatttgaatttcaaatccgccgttttaattttttatggctaattaaacttagctttttttggtaagcattccgtaaatccacagaacaattaaagcgcctccgatagctaagatccagcttctgaagttccagaaagaatctacatctccccagtgaagaagataaacgcctattgaacctcctataaaggctcctacaattccaagaatcatggtaataagcattccgcccccttgtttccctggcatgattgctttagcgatagctcccgccaatagtccgaaaataatccatgttataaatcccatagttgcattttttaatgttaatatttatgtttagttcattaataatgttgggaaaacatgactttttacatcatcttttcttgaaaaaagaatctacaaactccgtaccattaaacaactgcaggtcctgcatcttttctccgacacctatatatttcacaggaatctggaactggtctgaaatcccgatcacaactcctcctttcgctgtcccgtcaagtttggttaccgctaaagcattaacttccgtagcggctgtaaactgttttgcctgttcaaaagcattctgaccggtagaaccgtcaagaaccagtaaaatctcatgaggagcatccggaatcaccttctgcattactcttttgatttttgaaagctcattcatcagattaattttgttatgaagtcttcctgcggtatcaataattaccacatctgcattttgggcaacggcactctgtaccgtatcaaaagcaacggaagccggatctgaacccatctcctgctttacaataggaactccgactctctggctccagattaccaactgatctactgcagcggctctgaatgtatctgccgctcctaaaaccacctttttcccttctgaagtaaactgatgtgccagttttccgatagtggttgtttttcctacgccgtttaccccgacaaccataatgacgtaaggctttttggaagtgtcgatatttccggttccggcgtgaggattttcaagcagaagacctgagatttcttcacgaaggattttatcaagttcatttacaccaacgtatttgtctcttgcaacacgttcttcaattctttctataattttgatggtggtagatgcgccaacgtcggatgcaatgagtacttcttcaagatcatcaagaacttcatcatctactttgcttttgccgactacggctttcgtcattttttcaaagaaaccctggctggatttttctaatcctttatctaacgtttctttttcttcttttttaaaaatatttttaaaccaactcatcttatgaattatggaatttaatgtttatgatggaagtaaggagatggaggcctgaagtttaaaaccttatttttaagttttatgatgaacttccagcatccagcttatgacttccagattgattaaaagcaaagataacaaaaaaactacccaaaatatgagtagttttttatattgtaaataaagtggaggttattttttcaaataaccgtcaacttcgtctgcattcattactttttcttcgaaaacgtaagctcctgattttggagacttcaccattttcacaactttggtcatttttttagacccggtttgtagggttgctactactttctttgccatggtaaattatattttataaattacttgatttctttgtgaactgtaactttcttaagaacaggattgtattttttcaattccaatctctctgtagtgttctttttatttttagtagaaatgtatcttgacattcccggcataccgctctctttgtgctctgtacattcaaggattacttgaactctatttcctttttttgccatgatttagttcttttttatcaatccgtttctagtagctctttcaatagcttcctcgattccaatcttgttaatcactctcaatccatgagctgatactttcagtgttacgtgcttatcctgctccggaaggtaaaatttcttctctaataagttaatttcaaaacgacgcttcgttttgttattagcgtgagaaacgttgttaccaaccattgcacgctttcctgttatttggcaaattcttgacatatctcgatgttcttatttgtactataatatttgagtgtgcaaaataacaaagaatttttcagatagacaaatgttttacaaaattatttataaataacttatacattaatcgttcagattttatgttaatctcactctcagtacgtgttggctttaagaatgatagtattcatatccggaaaagaaaaatttttaagccttttttgtctttctctgaaaccagcggattaaaaaataaaacagcagaaatcctaaagcaaaaacggaaaatctggataaaagatctcctgatcttgtataaaaagtcatcccgtcatacaggtttattttagaaaataaagcagttttatcaccgtaaaaagtatcttccatgatttcccctttcgcattaatatgagcggaaatcccgctgtttgcagctcttgcgatttctcttcgggtttcaatggctcttaattttgcgtaggaaagaagctgtttatgcccttctgtaacgccccaccatgaatcgttcgtcatgatggctaaaaagttcgcccctttttttacatactctcccgtaaattctccgtaaatactttcataacagatgatcggagccatttttcctttgttgaaagggtttgaaaaagcaaccctttctttatcggttcccagagaagcaaccgttccgcccagattaatcattgcatcgcccagaagtggcttcaaatagttcatataagggaagatttccacgcccggaaccagctttcctttatgatacacttctactttctggttcggaataacctgtaccgccgaattaaaactttccacccaaagtcccgtatgaatctggtaagcttctttcggtagatttttttcatttgtaaaaaaacgatgcgaagaaattcctgttgcgaaaaccgaacccggatgttgggctaaaaaccctttaagattgtttaaaataacactcttttcaaaagcggtttccgaaatagaacctcttcccggaagcgcagtttcgggggcaatgtaatagtctatttttgttttagaatttctttcggcaaggcttagaagatcgttttcgatggttaagctgtcctgcgtgtatttttctgcatacggatccagatcaggctgaagcatcagtacattaacatttccgattggtttttcgtcaaaattattatatttcaccacagaaataatcatcggaataatgattaaagcggcaataatggagatgtttttaataagttcttttctttttctccctgcttcccagattcttacggtgtagaaaatcaatacattaatgagcaggatccagaagcttccgccggttgctcctaaagtatcgtaccactggataagtttaggataatcagaaaaaacatttccgagatttaaccatggccaggttaattcccatcctaaatggaacttttcaaagctcatccagatcgcgatcagaaatcctaaaccccaatatgttccctgtgcatttttgtaccagtgataacattggaaaaccaatgaatacaggaaagaattgaccaataccggaaatacaaccgccatcatagaatggcttccgtccggattttttgaaccataaagccagcctgttgttaccacattccagatcacaaaacagagataggaaagtccgaaaaccacccagctttttctgttgtaatctgaaaatttggagacgccgtgttccatcatcaaaagcggaacaagcgcaaaaaatataaaaaacggaacgccgtaagtaggccacgaaacggacaaaagcatcgctgaaatgagcgtaagtaaaacgtatttcattaaattgatttaacatacaaatttaatgtttttgaaatgaataaatttgcaaacgatgttaaagaaattttataaaatcattattgttccttatacgctgtttttgctgtacctcatgtttttcgggatgggcagaacgcagatggaagataatctgttaaccatagagcctgtattttctaccattaatttcattaaaggatgtatttcatggaaagaaatcgtgaccattgttgtgggaaatgtggtaatgtttattcccttcggatttctaggctggatttttcctaaacttcaggatttacagaatctcctttttacgtttatttcggcaattaccattgtggaagcaattcagtacttttccagaatggggatttttgaagtggatgatattattctgaatacttttggcgtatttctaggctttttaatgaagaattttatcgaaaaacgatttccaaacgggatagtttgaaatgtttaagaatacatcaacaggaatgggtttttagttcattataatgatgaaaaaaactcagttcggataagaaataagtttaaaataattgatttgtagtattgtattaatttatcgcaaagcaaaacaaaagattttttttaattattaaaagttgataagctaaacaaaggcacttcgtttatttaaaaaagacaaaaatggtattactttgatcaattttacgtctttgtatatcttaaaaactgaattcctgataattgaatctcttggtttaaccttgcgtttaagaagacttatcccgaactcaggttaaaaaaagaaaatcggctttagccgaaacctagtataaattcaggctgaagtcgattttcatttatcctctgaaaaagtctgattatccattcagttctttcgcacgtttttctgcactcagaattccgtccttcagaatttcctttaaattattttcattgaaggatttcagggcagcttcagtggttccgccttttgaagctacgtcttttatgagctcttccagacttttatccgaattgttgattaaatgatacgctcccaacatcgtctgtttcacaaaaagctgggaaagattttcttcgattcccatttctacccctgcttttatcatcgcatcgataatgtagtaaaaataggcaggtccgcttcccgaaagcgcggtaacgctgtccaacagttcttcattttccagataaacagatcttccggtagaatttaatagtctttcgatattaattaactggctgaaagaaattccttccgcagaagtgtagcctgtaattcccattccgagaagagtaggagagttgggcatggctcttacaaccaaaggatgatttaataatttctgaattttcttgattttaattcctgccataatcgataaaaccatttggttttcttttaactgaaaccggaaattttccgctacgtgctgaaaatcctgaggttttacggcaatgataattaaatctgcgtccagatctttcacttcatcgaaagtagagatcttagactttggaaattcttccgagatttttgaaaatttagactggtttcttgtaattaaatgaaggttttcaggctttatcagttcgtatttcaaaaaagactttgaaaaggataagcccatatttccggctccgagaattgctattttcatatttgtgtgtttttattattctgataattagttctaaagttagtaaaattgtttaaaatcacgaatatcacaaaagattggattttaaatagtttttgtgattaatttcttatggcaaattaaaaggtcattttagaaatatttttaaataatattcacctctctttccagttcaatcccgaatttttcttttacagaattaataatctccgtcgaaaaatcaaaaatttcctttccggttgcgtttcctgttgcgttaacgataaccagagcctgtaatttatgtgaggcagcatttcctatttgttttcctttccagccggattgttcgatcagccatcctgcaggaacttttacagaatttccgttcggatatcccggaatattttcaaatttctgctgtaatgcttcaaactgagccaaaggaatcgtgggatttttaaagaaacttcccgcatttcctgtttctttcggatcaggtaatttgctttgccggatattgataaccgctctggaaacatcctgaatcgtaggattttcaatacctgaactttcaagttcggattgtattgcgccgtactctgttttgattttatgatttcggaaggtaagtctgaacgaaacttctaaaatcacatattttccttttccttcctgcttaaaaattgagtctcggtacccgaatctgcatttttcaagatcaaaagtttcaatttccagtgtttcaagatttaaaaccttacagtcataaaaaacatctttaatttcagttccgtaagctccgatattctgcatcggcgaagttcctacattccccggaattaaagaaagattttccagtccgccaaaattcttatccagacagaacatcacgaattcatgccagttttcgcctgcttttgcggtaaccaaaacttcgttctcatttacaggctgcaccgaaattccttttaggtttaatttaatcaccaatccgtcaaaatcttttgtaaataaaacattgcttccgcctcctaaaaataaagtagtaagcgaatgagaattggagaaactaattgctcctttcagttcttcaacggtatgtatttcggtgaaatatcttgcttttacatctaccccgaaagtattgtatggctttagtgaataattttcgtgcattattttagttatattctgttggaagaagggcgttaatctggtcttttaatttctgaagctgttgataataaatagtatccgaatacgaatttacataaacgtggtattttttcggcgttctgatctggaaagtttcatcaaaaccgtcaaccggctgtttgctgggagaactttttattttgtctaatgtttttatattaagagacgccgttactcttttccagatttgcggggttattgcagatttccattctttgtggattttctttgctgaaactccctgttctgcaaaaacagaatccttgttaatttttacgattttgtaatttccgagatctccgccgatatccgaatagcttatcgaaataatttcgttggcgtttccggaataattttcttccttcttgcggttacatgaaaaaaatatcagcaataaaataaatagtgagaacaatttcaaactatgatattttattgctgacatattatgttcgtttaaattaaagactgaattctgatttgtatttttcaagagcatctttaaggattgctgcgcttcttcttaaatcttcctctttcagaacgtaagcaattcttacctgctttttccccagttccggattgctgtagaatcctcctgcaggagctaccataatcgtttcgttattgtgggaatagctttccagaagccattgtgcaaacttttcagtatcatctaccggaagttctgcaacgcagtagaatgcgcctttcggttttgggcagattactcccggaatggcgttcagtaaatctaccagaacatttcttctgtgggtatattcttctcttaccgctctgatgtaagcgccatcattctggtgagccgccgttgccgcgatctgtcccagtaaaacagggcttaatcttgcctgtgcaaaaagcattgccgcatcgtggatttttttagaacgcgtaatcatacatccgattcttacgccgcacattgagtaacgttttgattctgaatcgataatgatacagttttctgccagttccggaaaagccagcatagaaacctgctgttttccgtcgtaaacatactctctgtatacctcgtctgaaataacaacgatgtcatattttaaagcaatctctgccaatttctgaagttcttcacgggtgtaaagataaccggtaggatttccggggttgcagatgacaatagctcttgttttttcagtgatttttttctcaaattcttcgatcggaggaagtgcaaaaccagtatcgatggtagaaggaatcgctactacatttacattgaacgtacttgtaaatccgttataattcgcataataaggttcaggaatgattacttcatcaccatcatcgcacaaagtagagatggcgaaatttaaagcttctgatcctccgttggttacaatgaaattatccggtgtaagatctgtgaaatccaaagaatgataatattctgtaagtgcttttctgtagtcgatatttccttcagaaagtgcgtattccaatacttttaaatcaatattctttaaagcattaagtgccgtttccggagtttcaatatccggttgcccgatattaagatgataaacttttgtccctttctgcttcgcttttagcgcaaaaggaaccaattttcttaccggcgatggcggcatgtggagtgctctgtttgaaatattcggcattgttcaaaaaatttgtatggcaaaaataagatataatttctcaataataaaataaagcttgtaaagaaagaattttaacagattgagttgaatgatttgctttaagaacccctgtaaagtgaatatttccttaataatagatacagaaagtgttttattaacctcagttcgaaataagaaatgaatttaaataattgatttatagtgttatattaatttatcgcaaagaaaaaccaaaagatttttttacttgttgaaagttggtaagctaaacaaacgcacttcgttcatttaaaaaagacaaaaatggtattactttgataagttttacgcctttgtatatcttaaagctaaattcctgataattgaatcgctttgtttaaccttgcatttaagaaaacttatctcgaactcatattaattaaaaaatcctctgtgagctttgtgttaaattaggcatcatgatttaaaccttcgaatcaaaaacttaaaaaaatttccattattctttgttaagtgtaacggctttgtgagcctaaaaacgtttcataattaaaaatccttcgtgagctttgtgttcaattaagcatcattgaaaaactgaaaaataagcaaattcaatccgtttccgaagatgattatattttccagattctcgtggaaaagtaaaaagagtaaaattctaaaaccctgcaatcgcctttccagagccaccgccgaaaggaggaagccttcgggaactgccgaaaccatatcgccaagaggagcaaattttcggaactctccgagggtattccgcccaagatgatatactatcgggaactcccgaaatcatctcgccaaaaggaatatgatttcggaaacctccgaagctaaaatgccagagtgagcatattttaggaacttctttaaattaatttcggaattaaccgcaaaagatgcaaaatataatgataaagcgaatttccagaataatcaaagcactcaaaagaataaaaatcaaagatttttaaaagctattgtgttcttcttatttataatcaccagctttaaataaacatttagtttatcttttgcgacttttgcggttaaataaacttcttataaaaagttagcagtaaaatgaaataatgttttaaaacggcttctgtcaggggtttaacataataaaatttctctcttttgtttgatttataactatatatttgctgttcaattttaaaaaaatatacaattatgaaaaaagtatttttcgtcgctatgcttggtgtagcggttcttgttagtgctaaaggaacaccggtaaaaagcttaaatcttaaggctgcaaaaaaaatagtaagtactaaagtggtaaaaaagacaaaaaaaacggataaattcaagagcacttttgttacttatacttcttgtggtgtagctgctaccactactcaggactggactaacgaacaaggacaaatttgggccaatatggttgaagcaatttattgtggacacggttattaatagttaagaaataacaaatcttcatttgcacatatggttttatatgtgcaatttttcataataaaaagcaatagcaatgtcttatcataaaaaactatttcaactattcgttttattttacagtattttattttattctcaattgaatactaaagattcattgcgaggagagttcatttatttattgaaagctaaattaaatacgttaaatcctaatcagacagatgaagaactattctcacttcaggtagctgattatcgtacattttttagtagtcttaattctttgaaaagagattctgtagccggtattgtttcaagaaaagcaattaataatgggggaggggtttttgatttcagagggacgtcaatgccacaaacaaagttttcttatacgatcatacaaaccaatgaaaatatacagtattttcaaagagttgccatgtctttactgtcatataaagaatcggcaataaaagattggaaacttattgatgaaacaaaaataataaatacaattaattgcaaaaaagcagaggtttcatataaaggcagaaattggactgcgtggtattctgcagaaattccattgccttatggtccgtataaattcagtggattgccgggattaatcataaaaataactgataataaaggggattatgattttgaactggtaagatctgtatctaattctaaattgaaagacagattggtaaatatatacgaaaacagatacactaattcaacggaaacaactaaaacagaattagaaaaaacgttacaaaatttcagagaaaactcattaggaatattagaaagtcttggaacaagtgttactccggaacaaaggaaaatcatcatggaaagacagaaagaaatgcagttaaggaaaaagggagataaccctatagaattaaattagtataataaaataggaatgaaaaatattatactattattcaaaatgatagcctttattcagttaaaaatcgttcttcagctttgtattcaattaagcatcaagattaaaaccggtgaatcaaaaaagttaagaaaactttcccttattctttgttaagtgtaacggctttatgaacctaaaaacgttaataaaacttgtttacattaatttaggaattaaccgcaaaagatgcaaaaaataatgataaagcgaatttccagaataatcaaagcgcttaaaagaataaaaatcaaagatttttaaaaactattgtgatcttttttatttataatccccagctttaaataaacaattagttcatcttttgcgacttttgcggttaaataaaatgtgtaaacaaatttcataactaaaaatccttcttcagctttgtgttcaattaagcatcaagattaaaacctgcgaatcagaaaaaagttaaaacaaagtaattcatttaaaatcctgttccgctaaaattttgttaattttgagaattattaaaactgaaaaatatgcagattccatccgtttccgttgatgattatatttcccagattcccgaagaaagacaggaaatattcagaaaaatgtatcagacaattaacgataatttacccgaaggttttacgcagggttcaagctacggaatgatcggttgggcggttcctctggaaacgtatcccgacggttatcactgtacacccggatcacctttgcctttcatcagcattgcttcccagaaaaatttcgttgcgttgtatcacatgggaatgtatgcgaaacccgaactgctgaactggtttgtagaagaatttccgaaacattccaaaaaaaagctggatatgggcaaatcctgtgtgcgcttcaaaaaaatggaagatattccgatggaattactggcagaaatgagcaaaaaaatgactgttgaagaatggattgatatttatgaaaccaattttaaaaagaaataatcttttactgaaagtttttacgttttttttcctttttgtcctgataattgggtgtaaaaactcacagatttcaggtttgaagaacggagatttgctttttgtgactgcaaaagaaacgggactttccggggcaatcaataatgttacccaaaagcagaaaaatgcttccttcgaccacatcggtattgtggaaaaaagtaaagacggaattttcgtacttcacgccgctccaaaaggcggttcgcagaagcaggagataaaagatttcctgaaagatcagtccaaagaaggacagcgggttatggtataccgtctgaaatccgaatatcaaaaatcgattccttcagcgcttgaaaaggcaaattccatgttagggaaaccgtataacttcaattatattctggatgaaaattcctattactgttcagattttattgaaagagcttttcgggaagatcatatttttaaactggaaccaatgaccttcatcgatccgaaaacaggaaaaacaaatgctttttgggaagaattttatcaaaagaaaaatctgaaagttcccgaaggtgagttaggctgcaatccaaatggtctggctgcttctcaaaaactgataagagtgatggaactaaacaaaaaataaattatattaagattcaataggaacgggcttagcccgttttttttataaaaaaaattaaatgattttaacctaaaattaaacatcaccgcaaaaatgtcattaaaattaaaaaatatcaccctactaatttggtagactaatatttttttatatttttgtcagacaattagcacagagcatcagaatattaaatctgaaaaaagttttctctgaaagtttaaccctaaaatgttgagttatgataacgccaaatccgggattacaggttttacaaaatcaattaagcctgcccaaaaaagaatggatactggaaatagagctgaatggtaaaatgaaatttgaacatttgatgaataccatttaccatcagttcgggatctgtcataaagtgttatccgctaacgtagaatatgtggaaggaagaagtttcggtgcagttcagctttatattaatgtaagctcagaagattttaagcaattagaattttatctggaaaaaaataagcttttgagtaccacggtagaatatacgtgcagaaaatatacttaagaaattcatatagttttaattacaacaaacgaccgttgcatttttgtgaacggtcgtttttatttttcgttaaaaattaagattctcttaaattttttataattctttattatatcttattttaaacctgagttcgggataagtctttttaaacgcaatattaaaccaagatattcaattgtcaggaattcagtttttaagatatacaaaggcgtaaaattgatcaaagtaataccatctttgtgttttttaaataaacgaagtgcctttgtctagcttacaaactttcaataagtaaaaaaatcttttgtttttctttgcgataaattaattatttaaatttatttcttatcctgaactgaggatattttagaagaaaaggcaaataaaatctgcttcacgaagccagagattacagcttgattaaatcagtttattgattattctttactcactttataacaaggaatgtaaatataatctttgcgaaaaaaaagaccactcaaaaagtggtctctgtattttaaaataaaaattaaattctttcaatatccgctccgattgctttcagtcttccgtcgatattttcataacctctgtcgatctgttcgatattgtggataatagattttccttccgcggaaagggcagcaattaaaagagcatttcctgctctgatatcaggagaaaccatcgtcgttcctctcagcggagtttcctgattaagcccgattaccgttgctctgtgcgggtcgcaaagaatgatctgcgctcccatatcgatcagtttatccacgaagaacaatctggattcaaacattttctgatgaaccagcagacttccttttgcctgagttgccaccaccagaataatcgataacaaatccggagtaaatcctggccaaggcgcatcggaaatcgttaaaatagatccgtcgataaatttctgaattctgtaattttcctgcgccggaataaaaatatcgtcattgctctgctcaagctgaatgcccagttttctgaatgtattcggaataacaccaagctggttccagtttacgtttttaatggtgatttcagattttgtcattgcagcaagaccaatccatgaaccgatttccaccatatccggaagcatcgtatgctccgttccgtgtagatgtgaaaccccttcaatcgttaacaggttggacccgattcctgaaatattggctcccattctgttcagcattttgcaaagctgctgaagatacggttcgcacgccgcgttataaattctggtttttccttttgccaaagctgcagccattacaatgttggctgttcctgttacagaagcctcttcaagcaggataaacttaccattgagttctttcgcttttaatgaataaaagaattcttcctcatcataatgaaattcagcacccagttctacaagtccttgaaagtgagtgtctaatcttcttcttccgattttatcacctcccggagtcggcatatacgcttcaccgtatctcgccaacattggtcccattaacatgattgaacctctcagttttgcgccgtcttttttaaattcgtttgattttatataatcaaaatttactttatcagctttgaaagtataatcgccgtgtccgtttttggtaacctgtacaccgaagtcgcccagaatctcaattaatcgattaacgtcgtggatatcgggaatatttttaattctgacttcctcatctgtcaacaaaacagcacaaagaatctgaagagcttcgttcttagctccctgtggagtaatttcaccttgcagtctttttcctcctcttatttgaaatgttccactcatgtctactttcttttattatgattgttgttgttattattgttgtgccttcttttgttgttctggttgtttcggttgttattcctgttgttattgttgttatttcggttattattattggtcgtgtaatagatcttgctcttctcaagagaatctattccggtaagatccagcctgttttccgaaagttctttcaggtgacggaagattacatcgtctgttacgtgttctttattatagacattgtaagatttcttcatattgttggcaatcacctcgatcaaagcttctttttcgtcgccctgttcaagttcgatggctttttcaattaactgaagaatacttttcccgtaaaatttaaaatcaccctgaagttttggatattccattctcttcggtttttcttcaagttcttctttcgtaggaaaagggtagggagaatctacatccaattcatgattggctaaaatatagagatgatcccaaagtttatgtttataattttcttcgtctcgcagctgcgggtttctctgacccataaaatcaatgatcgccattgccatttcgcttctctcttcttttgtaggaagctctttacaacgttcaaccaactgttgtataattctgccgtattccggcaaatgaagctgagttttttgggtattgtattccatagtctgcaaatatatggaataatggaaaaattgtaccgaaaatcttaaaagtttatgattttttaatgaatcttccgaataacgatttgaagagatttgttagataaaattaaaattatttcacttagtttagaatttatttcaataaaattgtattttagttgatactttaataatttaaaatttttaacatgaaaaaaacacacattttactctcattgctggctttaggtattctgagttcttgccagaacaatgatgagatcgtcactgaaaactctaaacagttagagattcatgataaaattgtgaatgtcaccaatcatgatggacgccctttcagtacaggagcgggagtttcttccacctcaaaatttgttgccggaccgggtggaagtgtccttatgcaggggttttactgggatgttcccgatggcggaaactggtggaataccgtaaaaaccaaagtaaccgactggtcgaatgcaggaattggagcgatatggcttcctccggcttcaaaagcccagaacggagcctattctatggggtacgatcccacggattattacgatttcggaaattttaaccagaacggaagtgtggaaacacgtttcggatcaagagcggaactggaagctctgattacaaaagctcatgacgaaaatatgcaggtgtacgccgatattgtcatcaatcacaacagtggtggtcagtcggaagcgaatccttacacaggaaccagtacctggaccaatttttcgggggtagcatcaggaaaatttccaagaaattacaacgatttttacaaaaattcttacggcaataatgatgaaggtgcttttggcggttttccggatctttgccatgccaatccttatgtgcagagctggctctgggaaagagatgattctgttgctaagtattacaaaaacgttatgaagtttgacggatggagattcgattatgtaaaaggtttcggaccgtgggtggttaataaatggaatgcgaacgtgggtggattttctgtgggagaattatgggattctaatgtaaatacgctggaatggtgggcaaataatgccaacagttcggttttcgattttgcagcctattataagatggatgaagcatttgataacaataatttgaatgctttgaatgatgatatgatgtggaaaagaaatccttttaaagcggtgacttttgttgccaatcacgatacagacatcatttacaataaaatgttggcatatgcttatattttaacgcatgaaggatatcctacgattttctacagagattatgaagaatggctgaacaaagaaagactaaacaatctgatctggattcataataacaaagctaccggaacaacttctattttatatacggataacgacgaatatattgcaagaagaaacggctacaacggaaatccgggattggtagtttacatcaacaattcttcgacgtggcaggaaagatggattcagacgaactgggcaagtcagcagattaaagattttacaggaagttcaagctggtatcctacaactcagggcgacaaatgggtaaaaattcaatgcgctccgaaatcttattctgtatggtctttgaaccagtaggattcgacaatttaaaatgaaaagactgcttttttgaaaaggcagtctttgtttattcttgagaaacgtaatttaaataaaatcaaacctctataaattttttcctttcatccggagtcggcagataacatttctgatttgccagtttcattctgttttttgaaatcagatcataaattgtatcactgaaaaatcggggaattatttttccgatgactaaaagtttataaattccgcctaaaatattggcaatttgcagaaccgcattggatttttcaagataataatgatttggtttccacaaataaagcgtgttgaagacttccgtatttagttttctttcggttaagaaccgttgtccgaaatccgattgcagggaggcaaaaagaaatctgttgttgtgatctcttttaagaatccactgtacccagaaattgcagactccgcaaccgccgtcaaaaaatacaatatgtttccccatccatttttcctccatgatttttggttttaaagagccattttcctttcggtttccgctttttcttttttgaagtaatctactaatatttttctttgtgcatcggtaagtttcgcatcctgatgtccgatataatacgattccagaggcatttctttcttttcgaccatctctatgcattcatcaagtttatgaacctgctgtttgggaagataggttgcaaaagtagagaaattaagctcttttcttccttcatcaatatggtttttcagaatccatgaagcaggagcaatattagaataccacggatatctggattcgttggaatggcagtcgtagcaggaattattaatcagttgtgccacttcgggctgtgtgtttttgatctttaaaaaatccattccgggagtcggagccggattggttttatcaattgggaaaaactggatgatgataaaagcgacaagaatgacaaccaatatttttttcattgctaaaattttatgttttctgaatagataaagatacttaaatttcagataaataaaaaggataaaattcaggaaatctcaccactgtcttgaattgttctaaatatgatttttaacggctgaagattatttaaattaaagtaaaaaatgcttaacttaattgaatgattaattatttcaaattttaaataactgcaaaacagtaatttggtgtaaattattgtttttaactatcgtaaaaattttttcaatagattgtatttatattgtaacattggtaagtttgcattgttcattcagtaaaacgtaaaacaacataaaaatttaaacaatatggaaaatacttcaggagacatcagcaaatgcccttttcacaacggaacgatgaaaaaagaaaatgtagcaggaggtggtactaaaaatatagattggtggccggatcagttaagagtagatattcttcgtcagcattctgatctgtctaatccgatggagaaagatttcaattatgcagaagcttttaaaagtctggatctggaagaagtaaaaaaagatcttcatgctctaatgacggattctcaggattggtggcctgcagatttcggacattacgggcctttgtttatccgtatggcttggcacagcgcaggaacgtatcgtgtaggtgacgggcgaggcggagcaggagcaggacagcagcgttttgcccctttgaacagttggccggacaacgtaagtctggataaagcgagaagacttctttggcccattaaacaaaaatacgggaagaaaatttcctgggcagacttaatgatccttaccggaaacattgccttagaatctatgggattcaaaacgttcggatttgcgggaggtcgtgaagatgtttgggaaccggatcaggatgtgtattggggaacagagaaaacatggttgggcggagatcttcgctatgcacatggctcagacggagtggtagaaaacagaggagttcttcctactgatgataatgcagacggagatatccatacaagaaatttagaaaaacctttggctgcagtacaaatgggacttatttatgtgaatcctgaaggtccggacggaaatcctgatcctattgcagcagcaaaagatattcgcgatacgtttggaagaatggcaatgaatgatgaagaaaccgttgctttaattgcgggaggtcacacatttggtaaaacacacggagcaggacctgcagatcatgtaggagaagagccggaagcagcaggaattgaagcgcagggattcgggtggaacagtacctataaatccggaaaaggagcagatgctatttccagcggactggaagtaacctggacggaaactccgacggaatggagcaattatttctttaaaaatcttttcgaaaatgaatgggaacttaccaaaagtcctgcaggagcgcatcagtgggttgccaaaaatggtgaagaaattattccggatgcttttgatcctgataaaaaacacagaccgacaatgcttacaacagatttatcgttgaggtttgatcctgtttatgagaaaatttcaagaagattttatgaaaatccggatgcttttgcagacgcatttgcaagagcgtggtataaactgacacacagagatatgggaccaaaagcccgttatttagggccggatgttcctgcggaagaattaatatggcaggatccgattccggaagtggatcacgcgttaatcaataattcagacgttgaagctttaaaatcaaaaattttagattcaggtttaagtgtttccgaattggtttctacagcctgggcatcggcttctacattcagaggaagtgataaaagaggaggtgcaaacggggcgagaattcgtctggctccacaaaaagactgggaagtaaataatccggcacagcttcagaaagttttaagtattcttgaaaatattcagaaagaatttaacgaaaatcagacaggtggtaaaaaagtttctttagcagaccttattgttcttgcaggaagtgctgctgttgaaaaagcggcaaaagacggaggttatccggtaatcgttccttttgcgccgggaagaatggatgcttcacaggaacagaccgatgtagaatctatgggatatcttgagcctgcagcagatgggttcagaaattatttaaagaaaaaattctcagtttccacagaatctttattaattgataaagcacaactgttaacgcttacagcccctgaacttaccgtactgatcggaggaatgagatctcttaatacgaatttcgacggatcttctcacggtatttttacacagaatccgggagtgctttctaatgatttctttgttaatttattggatatgagtacccagtggaagtcggcttcggaagataatgaactttacgaaggaacagaccgaaaaacaggagataaaaaatggacagccacgagagcggatcttgtttttggatcgaattccgaactgagagctatttcagaagtatacgcaagctgtgatgctaaggaaaaatttgtgaaagattttgtttcagcatgggtaaaagtgatgaatcttgatcggtttgatttaaaataatttaattatttaacataatatttgaaaagacagccgatatggttgtctttttgtattttaaatgtaattttattggtttaaaattaggatttgtgtaataaagatatatttttgttaaaaaaacaaattctaacatgataagaaaattatttcctgccttactattggtaggttcttttagttacgctcaaatcggcatcaacggtgaaagtccaaatgccacattggatgttattggcaatccgggagatccattcaaatttgacgggataattgccccgagaattacaggagatcaattgagagcaaaaaattatactgcatcacaaaacggagcaattgttttcgttacacaggaagatacagctcctgcaggacaaaccatagatgttacggcttccggatattactattttgacggaaattctgggaaatggatcaaattgatctctgctgcagcttcacaaaaaatcaggacattatcaaccggaaacgttgcagacgacgattataccgttttaatatcgggagatgttactttaccatctgcaacttcgtcgaacagaggaaaggtctatcaactcatcaacgatactgcaggaaatgtaacggtaaatggattattcaggatcaacggaggcaatttttctaactatggattaaataacagcaatctgggaagaggaattgtagtgcagagtacgggatcggcttgggtaattacttcaagatattaattgaggaaagttatctaaacaaaaaaccgttaattattaaattaacggtttttgtagacccacagggattcgaaccccagatgactgaaccaaaatcagtagtgttaccgctacaccatgggtctgtatttctatgacgcgaaattatataaattattttaaaaataaaaatgatattaaaagaaaagtgcgtggcaatcgattattaattgatttacaaagatttatttttttaacttttttattcggaatgaaagtttctttgcatattaattatgagaaagtatgatttgaaatcagagcttttctgctacaaatatcaaattaaataaaaagcgtatctttgcaaaaaattgggctccaaaagttggagaaacccattaataacgtgtcctgagctttgtcgaaggattattaaacattttttatgtcgaatattgtcgcaatcgttggacgtcccaacgtaggaaaatcaacgctttttaatcgtttactggaaagaagagaggctatcgtagactctaccgccggtgttaccagagaccgtcattacggaaaatccgactggaacggagtagatttcacggtgattgataccggaggatatgatgtaaacaacgatgatgttttccaaggagaaatttctaagcaggttcagttggcgattgatgaggcaacttctatcattttcatgctgaatgtagaagaagggcttacagatacggattacgagatccacgagatgttaagaagatcaaacaagccggtatatatcgttatcaataaagtagattcttccaaagaagaactcgctgctacagaattctatcagttgggaattgaaaaatattacactttgtcttctgcaacaggttcaggaacaggagatttgcttgacgatgtggtgaaagatttcccgaccaccgaatacaaagatccttttgaaggtttaccgaaaattaccatcgcaggtcgtccgaacgtaggaaaatctaccatgacgaatgctttgctggatacggaaagaaatatcgtaacagatgtggcaggaacaacaagagacagtatccagaccctttataacaaattcggacacgagtttgtattggtagatacagccggaatgagaagaaaatccaaagtaagcgaagacttggaattctattctgtaatgcgttctatccgttccatcgagtattcagatgtggtaattatcatggtggatgctactcagggatgggaatctcaggatatgaacatttttggtctggctcagaaaaacagaaaaggaattgtgattttggtgaacaaatgggatttgattgaaggtaaggagacgaataccatgcgtgatttcgaaaaacagatcaaagacaaaatcgggcagtttcaggatattcctattttattcgtttccgcattaacgaagcagagaatcctgaaagcggtagacatggcaatgcaggtgtatgaagaccgtaagaaaaagatcaaaacttcaaaacttaatgaagtgatgcttcctatttttgaacagacaccgcctcctgcaaacaaagggaaatacattaaaatcaaatactgtgtacagcttccgacgccgtcaccacaatttgtattcttctgtaacttaccgcaatacgtaaaagaaccatataaaagatttactgaaaaccagctgagaaaagaattcgggtttaccggagttcctatcgaagtgtatttcagacaaaaataaattgtaatccctttcagatttttctgagagggattttattcttcattaaatatatatttttagataaaagcttttcaaaataatgaacacaatcgttttatcagaacaattttctttagttaattcatggatcaatgagcttcgaaatgttgaaatccagcacgaccgtatgagattccgcagaaatatggaaagaatcggcgaaattgctgctttcgagatcagtaaaacactggagcagaaagaaattgaaattcagactcctctggatacgattaaagtgaaagaaattgctgttcagcctgttattacaaccattttgagagccggagttcctctgtttgaaggaattttgaattatcttgataaagcagactgcggatttgttgccgcttacagaaaacacgacgccaacgattatttttctattaaacaggactatttaacgtgtcccaatatcgaagacagacctttaattgttgccgatccgatgttggcaaccggagcttctcttatcgaagccattaaagatctgttaacccatggaaagccgactgagcttcacattgttgctgcaattgcttcaaggcagggagttgaaaccatagaaaaagcgtatcccgatgccaaaatctgggtaggagctattgatgaaagtttaacatcaaaaggatatatcactcccggattgggagatgcaggagatttaagctacggagaaaaactacagcgataaaataatctgatcaatctttctcaggatcatttttacatctgaatttcttttatttttacggaaactgaaaaagccgaaggaaaaaatattttttctcgtctaatataaaaagtgaccgtaatgaaaaccggaatatgaatttcgagtttatcttccgtcagcatcagaaaatggtgtataatcttgctttgcagtatacccagaataccgaagatgcggaagaaataactcaggatgtttttgtaaaaatatcacaaaaaatagatggctttaaaaacgagtcatccttaaaaacatggatttaccgcatcgcaatcaatacatccttagattttcttaaacataaaaattccaggaaaagattccttttcggtctcttcagagattcggatgccgaaaacagacagaatgaaccggtagatttcaatcatcccggtgtggttcttgagcagaaagaagaagtgatgaaaattttcagctttatcaatatgcttccgaatgatcagaaaacagtcgttattttactgaaaattgaaggaaattcccaacaggaaaccgctgaaatcatgaacatcagtcagaaggcagtggaatcactttttcaacgtgccaaaaaaaatcttatccaaaaactaaatcaacagaaggaatatgaaaaataaatcgtctaagtatgtaatggaagatcagttgcagatattagaaaaaattcagagcgtggaggctccttcagaattgtacggaaagattgtcagtaaaattgagaatcagaagaaagatattgtttccccaaaatggattttcgcagcggctgccgtgatttttattctgatcagtttgaacgtaaaagttattcaaaacacaaaagataattcaaaatcagattttgataccttatttatgatgaaatcacaaaatactttttcgtatgactaaaaacaggttttacatttttattatcgttggtctgctgatttccaatctactgttggttgtcttcatgctcatgcgaaaacctccgcatcattcaggtccgcgagatcttattatagaacggctgcattttgatgaaaaacagatacagcagtatgacgggctgattcagcagcacagaatgcagatcagagaaaaagaacacgaattgatggatgcgaaaacgcagtattattcattattaaaaaataaagatcagaaaaacggagattctttggtacagaagatcggaacgataagtatggaaaccgagaaaattaattttaaacattttcaggacatcagaaaaatttgccatcccgaccagttgcaggatttcgatcatcttattgatgaatttgaagctttgtttgctccgggaccgaaacctccacacgagcgatgaaaaaaaatatttcgtatttacttagttttcgtgggtttggttttctctttcgcagacaatatttaccggaaacaagtcagttgaaaaataattcagaaagaagatcataactgtcgataaacaatttcccaaaaaagttttatcagccgaaggaaaataaatgtattgtcgtctaagaaaataatgatggcgtaaagaataaataaaatgaaatcggaaagcttaaaaagtaaaacagcctttgtcagctttaaaaaacaatgtgttataaaattgaaagattaacacaaatgttaagaactacgattaatcatgaagaatcaaattttttattccgaaaatatcctctaaaaacttttaaactaaacattctaaaaacctcttatgaaaaaacttacatcatggcttgttcctgcattcttcacagcagtagccttatattcctgttcgggcagcgatacctatgaagcaactccggttacacaggaagaatatcccggaattctggctgcttttggttccaatatcaatctcagcagtcttgaaaattatgccaatcagcctaaaccagcttatattacaagagataacacagccggaaatccgattacagataaaggtgctactttaggaagaatgcttttttacgacaaaaatctttccaaaaacaacaccatttcatgttcaagctgtcacaaacaggaatttgcttttggagacaatgcagttgcaagtaccggagtgaacggaacaacaggcagacattccatgagactggtgaatgcaagattcggaaatgaaatgaaatttttctgggacgaaagagcggctaatctggaagcacagactacgttcccgattcaggatcataacgaaatgggcttcagcggaacaaacggcgatggaacacttcaggatctgatcgcaaaacttcagaacattaaatattatcaggaaatgttcaaatttgtttacggagatgctaccgttaatcaaacaagaattcagaatgcattggcgcagttcatcagaagtattcagtcctttgattccaaatatgatgcaggaagagccgcaagcgcaaatgatcagcagccgtttgcaaattttacggcacaggaaaatcagggaaaaaatctatttctggctcctcctgtttttgatgcgacaggaaaccgtaccggtggcggattgggttgtgcagcctgtcacgccgctccggaatttgatattgatccgaattccagaaacaacggaattattggcaaaatcagcggaaccggaatcgatgtttttaacaccaaagctccaagtttaagaaacattaccaacagcagcggaatagaaaacggacagtttatgcacaccggaaattttacaacacttcagcaggtgattggtcattacggaaatatcaatattgcaccgggaaataccaatcttgatcctcgtttagcgcctaacggaaacggacaaaagctaaaccttacatcaacggaagtgaatgcagtaatcgcatttttgaaaacactttccggaaccgatgtgtataccaataaaaaatggagtaatccttttaaataattacaatttcttaaagctgttctttatagagcagcttttttttattcatcaatcgccataaccaaaacactcactttgttatcgcccgatttcagaatctcccatgcaatcgaagccagcgtatttcccgttgtaaaaacatcatcaattaacaaaatatgcttacctgaaatatttttagtcattgaaaatacattttctgttttcagccggttctgcttatccttcaaagcctgagctttagaataatgatttctcttcatcacatcatgatcaaacggaatagcataaaattctgaaagcgtttcggcaaaccaatgcagttgattatatcctctttcttttaattttttcggatgaagtggaaccgtcaccaaaagatctggcttatgatttttaaaatcaagtctttccgtcgtccattcagctaaagtttttccgattttctcccggctcctgtacttcagttcatgaattaattttcggctcacattttctttttcaaactgcatgagtgcaaaagcattttcgataggaaaaaggagactgcatttttctttaacaaaattatcttcagaataatcgttgtgggtaaagtggatctgttcaaaacaaagattacagaccgggaaattggcatcaataatgcggctgcaccgaatacagcgattcggaaataaaatatcgagcatcatttgcggattgaataactaaaatgattattaattttttacaggaataaaagattattaattctttcgattaaataacccgaataattaaattgttttttatatccctaattggtgtaaaaataatcatttcacccgaaaatgaagtgaataattaaaaaaaaggaaaaaaatatgattgtccgtaacttgtcataattagaaaacctttgagttcttcgctttatgctgagcttgtcgaagcacctttgcgaacttaaaaacagttggtatataaaagaatcttagcgattctttgcgtgaaaattaagcattatgatcaataacggataatcataaaaaaaatgattgtccgtttattaacctaaagcttcgacaggctcagcttgacatcgctagaaatcaagcgtttagtattagaggtgtcacactgagcttgtcgaagtgcctgttataaataattgaatttcatatcagtgcaaagtaataggttgtttaacggatattcaattaaaaaaattacaaaatatccttcctgatcttttcaattgcgtttttcatccccgaattaaaatattccttctccagacggattggcggcgattgtcttacttcgcagtccgcaatgctgcacgattcgcaggtaactcctacattgatggtttttaaagtcggagacttaataaaattgatttttttgatggtctgagaattcaataaaattcccaaacagtaacttctgttgcttccgtcggaaaaaggatttttctgtgaggtggaaatcacaaggtagctgattccctgatctttataatgagaaatctgggcttccgttaatgtttcattttcttttaaatgatgaagatttttcacggcaatccatcttctgcagtaatgctcgttcgttgcattcgcatgaggggcctgttgatgattgaggtgtaactcttttaagatctgtattttatctgaatttttctttttgactaagcataaataaaacaaatcttttattcccagttcggaagaaagaagattcgtcaggcgatagtaaaatgtttcgggagaattggtgaaattatcgattaaactttcaaaattctggggattccattcgttttgcagaaaaaaatctgaagttttttcaattgttttctgttttgaaattaacaaagctcccgcaaaatacgaagcataaaaattatttaaaatttcttcaaaacttccgaaatccagccacgaatacgtattcgggcggtttttcagctccagaacattaaatccgatctctttcgcaagaataaatgttttctgatctttttctaatttccggtttaaaagcaacagttttttttcagggataaacaacgaccgtaaattatccagcgttccgtattgttcaaaatcttccgactgaatatggtaattaaatttttcattcagaatagtctccagaacatcagactgtaaatttttgtcgatctgcaatccgttttcctgagcaaaaagctgaacttttttctcaatttcaggaaaataattatcataaagctcctgaaatgaacgtaaaacggcaaagtaaaatctttcctttcctaaattataattttgcgaaatttcgatcagggcattgataaaagcggttacttttttaggagcatcacttataatgctgatcaggttatttttattgatcccgaaaagatccagaggaatttctttaaaaaaatctgactgaagaatttcattaaaaggagtgaggcttttgtccagtttcgtggaaaccagatcgtcaaaagtgcagttcagcgcttccgaaagctgaatgattttatcatgtttcggatatttttttccgttttcaatttcgttaagataagatttggataaaccggtctttaccgcaagatcctgtaaagaccagtttttcttctgtctctgctgtttcagtttcagcccgaaaaccgttttaataaagtcactgtccgaattcataattcaaagataatatttagaagcgattattcgcataataatttttaaataaatttagcgaacgttcgctatttgtgaaaatttttatttatgtttgcaatgttcaattacaaaattaaaacaatatggaaaccaagattcagttgaaaatcaaggaacaacaaaattttgaagaagtttttaccaatgatttaatcgattttttggttgagcttcatcagaattttaatccgaaaagaatacaacttttagaagatagaaaaatcagacaaaaagaatttgataaaggaattcttccggaatttttagaagaaaccaaggaaataagaaacagaaactggatctgcgctccgcttccgaaagatttactggatcggagagtggaaattacaggaccggtagaccggaaaatgatcatcaatgcattaaattccggagcttccacttttatggcagattttgaggatagcaattctccgacatggaaaaactgcatagaaggtcagttaaacctttctgatgcggtgaaccggagaatagattttacgactgaacaggggaaatcttatcagctaaatgaaaaaacggctgttttattggttcgtccgcgaggtttacatttaaatgaaaaacatattgaaattaatagggaacaggcttcggcgtcattaatcgatttcggaatttattttttcagaaatgctaaacaattacttgaaaatggaagcggtccgtatttttatctcccgaaattagagcattatcaggaagcaagatggtggaacgaagtgtttgtttttgcacagaattacttagaaattccgcagggaaccattaaagcaacggttttaatcgaaacaattaccgcttcttttcagattgatgaaattttatttgaattgaaagaccacagttccgggctcaattgcggaagatgggattatattttctctttcattaaaaaattcagaaatcttccccagtttattgttcccgacagagatcaggtaaccatggcttctccttttatgagtgcctattcaaaacgcgttattgaaatctgccacaaaagaaatgttcacgcgataggaggaatggcggcacagattccggttaaaaacgattatgaagcgaacagcattgctttcggaaaagtaagaagcgataaagaacgggaagtaaaaaacgggcacgacggaacctgggtagcgcatcctgctttagtttctgtagcaaaagatgtttttgataaatatatgccttccaaaaatcagatcgataaaaaatttcaataccatatcaccgaaaaagatttactggaagttccgaaaggtgaaatcaccgaaaaaggggtccgaaaaaacatcaacgtcggaattctttacatcgaatcgtggttaatgggaacgggagctgcagccatttatcatttaatggaagatgcggcaaccgcagaaatctccagaacccagatctggcaatggctgaaaaatgatgccgttttaagtgatgaccgaactttaaccagagaaatgattcttcaatgggaatttgaagaactggaaagaattgaaaagtatgttggtgaagaacgtttccgtaaagggaaattcaatcttgctaaagaactttttaatgaattgattttcagtgagaaatttgatgaatttttaactctgaaagcgtatccttttatttaagagggagagtaatgagagtgggagagtgggagagtgggagagttttagggtttgagcgtttaatgtaattgcaacgatcaacgatcaaccatcaattatcaatcatcaattatctatcaaccgtcaacaaacaacaattaactaaacaaaaaaaatagtatgaaaacaagacaagaacaaattcaggagatcgaaaaagactggcttgaaaacccacgctggaaaggagttaaacgtccttatacagcggaagatgttttaaagcttcgcggttcttacaaactggattacaccattgccactgaaatgtctaaaaaattctggaatttactcagcaatcaggatttcgttgcaggacttggcgcgttaactggaaatcaggcggttcaggaagtggacgcaggtttgcaggcaatttatctttccggatggcaggttgcagcagatgccaatttatcgggagaaatgtatccggatcagtcattataccccgccaattcagttccttctgtagtaaagaaaattaacaatgctttattgagagcagatcagatccagtctgtgaacggaggcggcgaaaaggaatatcttgttcctattattgccgatgcagaagccggttttggcggaaatttaaacgcgtatgaactgatgaaacagatgattgaagcaggagctgcggcagtgcattttgaagaccagctttcttctgcaaaaaaatgcggtcatttgggaggtaaagttttggttcctacacaggaagccatcaataaattaatttctgctcgtttggcggcggacgttttgggagttccaagtttaattattgcaagaacagatgcagatgcagcagatttgctgacctctgatattgacgacagagataaaaaatttgtaacaggcgaaagaacttccgaaggtttttatgtcgtaaaaaacggagtggagcagggaatcgacagaggtttatcttatgcgccatacgctgatcttatctggatggaaacttctaatcctgatctggaacaggcaagaaaatttgcagaaggcattcatgcgaaatttccggataaaatgttggcgtacaactgttctccatccttcaactgggcagcaaggctttctgtagaagagatgcagaatttccgtgaagagctggcaaaattagggtacaaattccagtttattactttggcgggtttccatgcgttaaataccgcgatgttcgagctggctttagcttataaagaaaaaggaatggcaggatattctgaattgcaggagcgtgagtttgcgttgcagcaaaaaggtttcagagcagtaaaacatcagtcgtttgtaggaactggctattttgatgaggtacagaatattgttaccaacggctcttctgcaacagttgccatgaaagattctaccgagaccgcacaatttcactaaaaagtttcgttttaattaaatttaattgttagaaccttctcgattttgggaaggttttgttttttatgtgttaattttgaatttatatttgaaggagatgagtttgatttttgaaaaacagatacaggttacagagcagcatattgatggaaatgatcatgtaaataacgttcagtatgtgcattgggtggaagaaattgcagcagcgcactgggattttgtaaaacataaaaccgaatatccgaaagatatctggatgcttctggatcatcatattcaatacaaaaagcaggtgtatcttaatgacatcattaccgtaaaaacctatccgaaagctcctgaaggaattcgtcagccgagaaaagtggagttttactgtaacgatcagttggttgtggattctactacattgtgggttttggtagacgttgaaacgcagaaaattaaaagactggaaagtgactggttggaaaagctaaaatgattcctttacaatttttgcaggatttcaaactttgtttcttcgatggttccagtgatttcctgaatatttccgtttttgtcaaccataaaagtcattggatttctcagcagtgtaaagtaggatttcagctcctgtccggaatctgtaatttgctgaaaattgaaaggtcttttggttaaaaattgattaactttttctttactgtcataggtaatagctataaaattgattgtttctcctgaaagttctttcagtttattaagatagggaagctcttcaagacagggttcgcagtgagttgaccaaaaattgataaaagagattttcccctttaaatcattggaattgaaattttttccttcagaatttttatagttttcaatcggaaaatgggttcctattttattttccagatcggggtaagtccaaaactgtctcttttgagcattaaagattacgctgtaaaagattaataataaggttattgttttcatgatgaagtaacggttcatcttcaatattatttcatgaagattattttcttgtactcaaagaacatgaacggaacaaaccaaattccttatctttgcaggatgatacgtattacaaaaatttttacattcgaaaccgctcacgttttatacaattatgacgggaaatgtaaaaatatgcacggacattcctataagctgtttgtaacggtgaaaggaaagcctgttaatgatttggaaaaccctaagaatgggatggtggtggattttggtgatattaaaagtatcgtaaagtctgaaattgtagatgtttgggatcatgctgttctcatcaacggactttcgccgcacagagaactcggggaagatcttgaggaaaaagggcataaagtgatctactgtacatttcagccgacctgcgagaatatgttatatgccatcgcagcaaaaataaaatcgaagcttcctgaaggaatttctttggcttatcttaaacttcatgaaaccgaaaactcttacggagagtggtttgcggaagataatcagtaattttttattcagaaaaactcagaacggtgttaaaaacaaccattaatttagaacccggtaaaaaagtatatttcgcttcagaccagcattttggcgcaccgaatccaaaggaaagtaaactgcgcgaagagcgttttatccgttggatggacgaaataaaggaggatgcgcaggttctttttttaatgggagatctgtttgatttctggcatgagtggaaacacgtaattccgaaaggatacgttcgtgttctgggaaaaattgccgaactgaaagaccgcggaatccatatttacttctttgtgggaaaccatgacctttggatgaaagattatcttgaagaagaaatcggatgcacggttttctataaaaagcagtattttgagatgggcggaaagcagtttttgcttgctcatggtgatggattaggaccgggagataaaggatataaaagaatgaaaaaagtctttaccaatcctgtcgcgcaatggttttttaaatggctgcatcccgatattgcgatgaaaatagcattgtacatgtctcagaaaaataaaatgatttcgggagatgaggataaagaatttctgggagaggataaagaatttctgatcatttattcaaaagaaaaacttaaaactcagccaatcgattattttatttacggacaccgtcatcttccgatgattctggatcttgaaggaaaagcaaaatacatcaatctgggagactggatctcttattttacctatggtgtttttgagcatgattttgaattgaaaacctttggagacagcacaaaaaaaattaccccaaaagctgaggtaatttccgaatgaaccgaaattcattcatgtttttaatccatattccgtattactcattgcaataatctgaccattttttaattttaagattaaaaatgattaaaaaacaatcttttttatgataagtaattataaatgaggttgaaagaataaaaatatttttagaagtgaaaaatatattcggcatacaaacagagcaggattttttggctgcatcactggaaaccttccgttatcagtatgaaaatattgaagtttacagacgttttgtagattatctcaacatcaaacctgaaaatgttgatgaactgacaaaaattccttttctgcccattgaaatgtttaaaaaccatcaggttttggataaaaatgcagctactgatcttttttttcaaagctccggaaccacacagatgaatttatcgaaacatttcattgctaatcctcaactgtatgaagaaagcatctataaaagctttgaacagtttatcggaaaaccggaagatttcatttttctcggacttttgccaagttatctggaaaggcaaaactcttcgctgatttatatggtagattatctgatgaaaaaatccggaaaacctgaaaacggatatttcctgtacaatcatgaagatttatttacacttttaaatgaattacaaaataaaaaagttattctgttcggtgtttcttttgctttgctggattttttagacttctgtgacagcaactcaaaaacgcttcaattctccgattcattaaccgtaatcgaaaccggaggaatgaaaggcagaaaagaagaaatgaccaaagatgaactgttgaacattttacagaaaggttttaaaactgataaaatttattcagaatattcgatgacggagcttctttcacaggcatattctttaggaaataacgaatatcagtgtccgaactggatgcgcatcatgatcagaaatgcagaagatccctttaattatgaaaaggagggaagaacgggagcgattaatatcatcgacttggcaaatgtacattcctgtgcattcatcgccacgcaggatttaggaaaaattggcggagataaatttcaggttttaggcagaatcgatcattcagatattcgtggatgcagtctgctggtaagctaattgatgttgtttaaatttctgttatcatttgcttagtgaaacgcctttgcgaacgaactatgcagagcaaataataaataaaatgtttgcgacttccgcgttaaaattgaagagtttcataaaagcagaattattgtttaaatttaaacttcagctatcattagcttagtgaaacgcctttgcgaacgaactatgcagaacaaatgataaataaaatctttgcgacttccgcgttaaaaacaaaaaaaacaaaaagtgttaaaaatagaagaattggttcacgcatttattcattctcaatgcaattttgagaaggaaattgttttgaccaatcattttcaggcagactgggaagccgatattctgattgttgattccgaaggattcagccacgaaattgaaattaaactttcaaaaagcgatttcaaaaacgattttaaaaaatcttataccaactccaataccggcgaaaaatttttgaaacatgataagatttcctgtggagattatatttgcaatgtgttcagttttctgcttccgatgggaatggtagatcatgaaatgattcccgaacattgcggaattatcgaattttaccacaacgtagactcttgggaaacggaattttatatcgtaagaaaaccaagaaaagtacatgaagattcttactggaagctgaatgataaagatctttttatcaggaaaatggctttaaatctattatataagaaaatggagatcaaaggaaagcatgaagaacttatcttcaaaaatccgtttgatcttaaaaaattaaagtagtctttcaaaatgtcaaacataaaaaaatcctgtcggctgacaggattttgtggttaactatctaattcttccatgccgtttcgctgcagcaggaatctgtaaatcaatcctcccgcaattcctcctaaaatcggagcaacccagaacagccaaagctgagacattgcgtttccgcttacaaaaactgcttgagaaagtgatcttgcaggattcacggaagtatttgtaatcgggatagaaatcaaatggattaacgttaatcccaaaccgatggcaatacctgcaaattttccgttggcaaacttatctgttgcgccaagaatgatgatcaggaaaaaagcagtcagtaaaaattctgttaagaaagcagcactcatcgagtagctttttccaaaatagaccgcttcaccgtagaaattggtggcaaaagctcccggtcccgaaaaatccggagttccggaaccgctcagaatagtaaacaatgctcccgcagctcctattgctcctaaacattgtgccacaacatacggaacaagatctttggcagagaatcttccacctgccagaagtcctacagaaacagccgggttgaaatgacctcctgaaatatgtcctactgcatatgccatggtaagaacggtaagcccgaaagccagcgaaacacccagaagaagaatccctaattgtccattagatgccgctgcaatctgcgaggcgaagattgcacttccgcaacctccgaaaacaagccagaatgtgccgaaaaattcagcaaaaagtttttttatcatattgtttatttttaaaaagtatttcaaatttatcattaatatattgaattaaaaagtataattttaaaattattgcaaattaaattttgattttattattgatttaataatttaaaatgaaaataatagttaattatttttatatatatgtttattagagtttatatttatttcataaatgattattttagtttataatttttaaaatttctttcatgaaaaagtttttgtgtgtgatctttgcttcctttcttcatggcatattttcttcacaggcggctcaaaaaacattaccatgctatgatcttacagaagttttaagagtagaacccacttttctttataagccgcatctggatgcctcaaaaagttttggggtaaagcttctaaaggattcaaagaccgttcagaattatatcagcaaaggaaaatttcataaaataaaaaaattaggaaccggatatcgggttcagaaactggattacagcagagcttacatggtttctaaagggaaatcgatgctcgagaaaataggagcgcgtttcagtaaggaaacaaaagggaatatctttacggtttcttccattaccagaacactggaagaccagtgcagactgagaagggtgaattctaacgcggcattgggaataagctctcataattacggaaattcttttgacatttcgtatgtacggtttaatggtgttttaaagcataatcctaagttggaagctgctttggagaaggttctgaagcattattatgatctgggaagaatttattacatcaaagagaaacaacagagctgttatcacattacagtaaagaattattaactaattttcaattatacgtgagatacttgcatagataatttagtttctataattttatgccttagaaaaaccgtgaaaatatgaatacattcaacagagaacaatgcgaattagcatttgcagcgtgggacaattgccgtggaaattacaatgccattaaagatctgattcctaccaattatgtttttgattttgatgcagaacagatcaactgggtgaagaacgaaaatacaggaagtgagttttgtgctcagatcggtatttacgagaataagatggttgctgttctttgcccgatggacgaaggaggacataaaaaagaagtacaggattatccttacagttttttagctgaactgaaggaagaccttaatctggtggaaacggaagaatatacgcttgtgaaaaatgcggttctttccaaagaacttaaaacagtcgataacagttcggatatgttctggccgattgccaataagcccatgatggagcaggataaagcaatcgaagccatagaatcctggagaaacgaagcaatgacgtggttctacagagaatgcacagaatttcagggagcaagaattttcagacagttttatgtacctgcagaaaatcttaacccaccgaaagcagggctttcccatatggtttgttccttcggactgaaattttctcaggtgtatcagagagttttgcctacgcttattttcatttctttttatacaaatctggaaggcagtgaaaacggagtaagcgttgaaaaaatctccaatacatacgattggtcaaatgcatgtccgcctatctgccagtttatgtaatttttaactaaaatatattgtggatatttaccaggtaatactttatcttaataacagtttacttgttatttgtgctttaatcggaattttaaagtacaaaacacttagaaacacagaaaaatggtatgtatattatatcatttttctttttttgatagaagcggcaggaagagtttctatcagtctttttcatgtaaaaggtctggattttctgtttccttattacgtagcaggagaatttctcatcttgggaattcttttcgtgaaaaaattagcattaccatggtattgctaccttccggtagtagtactggcgctcttctttttactggatacaggaatggtaaccaatgaagtaaagaaagtaatttcaaatattattgtgatctgctttgccggttatgcactgcttatggaaattaaaaacaccaaggtaaatgaccgtttcatggcggtagacagtcttatttttctgtattatggattgtcggtctttttattctttcttcttcgtcagcttgcggattttggagtaaaacaggcagggatgatctggagcatcaataatgtgctctgcagctttttatatatatcaatcatctatacctttttaagattaaagaaataaccttaaatatcactttttttgtcgcgttgattgccgttttggtaatcatcatgacatttattttgttggcttacagaagtttcatccagagaatcattaaagagaaaaatgcacagtacgaagcagaagtacagcatcagaaaaatcttgctctggaaaatattaaagcgcaggaatcggaacggaaaaggattgccgtaatgatccacgacgacatcggaaaccgtctgaatattctttctttatggctgaataatttagataccaaaggcgatgaactcatcaaaaaaaatataaccacacaaatgtcttctctcatagattctgccagaagcatttcgcattcattatatcccgtgaatctggaatctgtgggtctcgttctttatattgaagagctgattgccaatttgtcgggaagaataaatatttcactgaacgtaagtccgaaatttcagaaaaaagaaatcttcgtggaagttcagttgtacagaattattcaggaatttaccaccaatgtccttaaacattcggaagcatccagagtctggatctatattaaagataataaaacaaatcttgcagttatcatttccgataacggacaaagctttgaatatgatgaggtaaaaaagggaatgggtattaaaaatatagaatccagaataaaatctatgaacgcggcgcacaaatggaaaaataccctaggtaaaggcagccgactaattataaaaattccatacaatgaactcccagatcaaaatagcattaattgatgacgaacaactcattctcgaaggcgtaaaaatgttattgtcttcggaacccaatatcacagtaggatctacctctaccaacggaccggattttttagaaactttagaagaaacctctgaagaagattttcctgatattgccttggtagacgtacagatgcagcccatgaacggctttgagctggtagaaatcttaaaggaaaaatatccccatcttaaaattattatcctttcttcccattacaaaacaaccattctgggatacatggtgaagctgggtgtttcagcatttttgccaaagaactctaaccgaaatgcttttatcgaagccattaccatggtctacaaaaacggaattttctttactccggaagatcatcagatgattttttcgtacatgaacagcccgaccaaaaaaagaacactctttgaaatggacgatgaactttccgaccgcgaaaaagatgtggtaagactcatctgtcaggaatgcaccaacaacgaaatcgcagaaaaattattcatcagtcccagaaccgtagaaagccacagacagcgaatcgtcgaaaaaataggagctaaaaatacagtgggaattgtaatttatgccattatcaacaatattcatcccttagaaagaatctgattccgtagaaatacggaattttttatttggtactttctactctattattccggtttttttcatcgttactttggagtgttcatataataagtacttcatttttaggaatgaagaaaagataaaaaccacaaagtgtaatggaaaacaacatcatctctgtcggaattttcttcgatggaacaggaaacaacgggatgaatgccacttctcataataaaccacttaggaataacgaaagctattatggtaatattaccaatatctataaattatttaagctgtttaaaagtgatgagaaaaaatatgtaggaggaatcggaacggttgcaggaaatgaagacagcgattttgcaatggctacgtgcaaaaatcctgcgggatatcacggatattcttcagatgataaactggaagaagctttttcctacattaaaaatacagttgaggacgataccggagaataccagttatacatctatggtttcagtcgtggagccatgttggcaagaactttttgtaataaaataatacagcatacctcagaattttcaggaaaaaaagttaaaattaaatttttgggaatttttgatacggtagaatctgctgctttcaacgattacgatgtggcggttttgcccgaaacagaaagagttcttcacatttgtggcgtaaacgaatgccgttatttttttcctcttacaggtattttcgaagaatcaaaagacagaacagacgcaaaatgggaaagcggaaactcggtatggaaagaaattttcgttccgggagcccatgcagatgtaggaggaggatatttagaaggttcccaatcggtttacgtttctccgaatttcattaaaaatagagaactctattactatgtggaaaacatcagaggaacggctttagattcagaaaaaaagaaaatctggaattctgtcttacaagattataaaatagacaaaggcgatattttttctcaggcttacgttacaagagatctggtgtacagtgatctttcaaaagtctacggaaaacttatgctgatggaaaccaattctgagcagtctgtttttgaggaggattttgatgaatttacttttgaaattcatcccgaaacacatccttacctaatagaattatcggaggctcttgaaaattatattaaaaacctttcacctgaccttaagccggattacgattatgaaaaactgacagattatacccatatttcggcaaatttcgggttatatcatcctgctttaatgatggaatccaaatcgggaattcctacagaaatcatcaataacggtctgaatgttccgagccattcggacgatcagttcaataaaaaccaatccagattacagtcggagattcatcatattgaagattctgtagtggattacgcctacggaaccaatattcccaacaacgataattggagccgtaccattttgatcaaagaaaatttttataataaatgttagtacattttcagttttaaatttaggtgttgagctgtcttggttaggcagctcagtttttttacgtgaaactacctatttttaatttggttatttatactgtagtttttgcttcttattctttgttactttgggttgttcttacaggaagcttcaataggaatgaaattcacatatagttaaacctaaagtcatttacaaagactaaaaaacagaacataatcatggaatacagagataacgaagtctatttcgatacggcttccaacaatttggtaaaaggatcttttaccgtaaacgagttttcaattactgaaggacaggatcctaaaggacatatttatgtaggatttacagcaagctgcggaagcgatggaaagtttattttttctatcggaagaaaaggatcttcagcagtagccaaatggttttctgcaagagttcccgcaaacagaacaacttttaaccacgatccgggagaacttaattttgctatgatcggaaccctggttctcgaattcaaaggcggaaaaacctgtaccttctacaatattgctttggcacagggacatagcggactaagcaataactggtggtttggaggcaaacagggaatgtacaatggaagtgataccgcgatctatggagcgataagtaataatattgtagagttggcatctttcctgagaggaggaaacgcagcagatcatatcaaagttactccgaaaacattttaaaaaaaacaacttaatattaaattttacatcagaaaaccactcttttaagggtggttttctgcatataatgcagcattcatttcttttccgtatttttgcacccgaaaattcattattcactattaatcattatttaacacatgctttcggttcaaggtttaggattacatcattcaggaacatatctgtttcaaaacgtgaatttcacgattaaaaaggatgataaaattggtttggtcggtaaaaatggagcggggaaatccactttattgaaaatgctttccggagaaattaatttctacgaaggaaacgtggttccggaaggaaacatcaccattggtttcttaaaacaggatctcgatttcgtaaaaggaagaacagtatgggcagaaaccatgcaggctttcgaacagatcaacgcatggaaaaatgagcttgaagaggtgaatcatcagatggcgacaagaaccgactatgaaagcgattcttatacggatctgattaataaaatgacagaattgaacgatcttttaatgaaccacgacgcttacaatctggaaggagacatggaaaaagtattgttcggacttggtttcaaagcggatgatttccagaaaattaccgatgaattttccggaggctggagaatgagaatcgaactggcaaaactgttgctgcaaaagaacgacatcatgcttctcgatgagcctacgaaccacctggatatggaatccatcatgtggctggaaaactttttgaaagattatcccggagccattgttctggtaagtcacgataagcagttcatgaccgcggtttgtaaccgtactttcgatatcaacaacaaaaaagttgacgattataaagcgaattattccaaatatcttgtgatgcgcgaagaccgccgcgaaaaactgattcaggctaaaaagaatcaggatgcagagatcaagcagatggaagataacatcaataagttccgtgcaagtgctacaaaagcatcattcgcacagtctttgattaaaaaattagacaaaattgaacgtattgaagtagataatgaagacgtttctaaattcaatatccgtttcgtacagtcgcaggttcctggaaaaattatcttcgaagctgaaaatcttggaaaagcttacggcgaaaaacagatttttgatgatgtggatttcatcgttcagcgaggagacagaattgcgcttcttggacaaaacggacagggaaaaacaacgttggcgaaaattcttgcaggagacatcaaagattattcaggaacttggaatcttggacataacgtaaacatcgggtattttgctcagaatcaggaggaagttttaaccccgaataaaaccgttcaggaagaagcggaagacgcggcaaccgaagaaacaagaccaagagtccgtgatttgttaggatctttcctttttcagggtgaagcggtgaataaaaaaacgaaagtactttccggaggggaaagaaaccgtttggcgctttgtaaattgttgcttcgtcctttcaatacgctgattatggacgaacctaccaatcacctggatattcagtctaaggaaatcatcaaactggctcttcagaaatttgaaggaacgttaattgtgatttcgcacgacagggaattcttacagggactttgtgacaagatctacgaattccgtgatggtaaaatgaaagaattcttaggagacatcaacgaatatcttgaattcagacaaaaagaatcaattcgcgaaatctctgcagaaaaagcaaaacttcatggagaagagacgaaggttgaggtaaagacaaagaaagaggacaagcctgcaacagaaactcaacaatcagccattgtaagcaaagagcagaaaaatattcagaataaactgaaaaaagtagaagaaaaaattactgaactggaaacaaaagttgaggaatttgaagcttctttcaccaaagaaaacccttctgaagaaacactggaaaaatacaacaataccaaagaagaactggatcttgctttgcaggagtgggaatatttgggaactcagttgaattaatttctaagaaatacataaaataaaccttataggtttttaaaacctataaggtttgattacagtttgtaacaaaatctcatttctacttactcatctatcaaaatattttaagaaaactttaatctcaatttttaaattatttttataattttgacgaatgatctttaaagaaaacagaaatctaaagaattttatttccaaattattgtttgggatctattttcttgcgctgttttcccagaatttccacagtcacagttccgaagatgtttttaaaaacttcagcttcaaaaaatcggagaatacagttactaaaaatatagcgaaggaaaaagcagcagactgtcttgcctgtcatttcttagctgccggaaatactttagttcctgaagaattcagtttttcttttgcgcattatacgcatgaagtaaaacagattattaccgttcaggaaaaaatatggtctcagaccaaatttacctttcagcttcgcggcccgcccgcaatttcataattcatagattcttttcggatttttgctaaataatttttagatacataatgtatttaattaaactaatctaatttttttttaaccattaagatgaatttaggaagtaagttttattaagaaaatcatatagattttttgtatctcttaaaagaaaggttaaacttaattgctataaatttttaaaacaaatcttaacggttcaaaatagaacatcgagattcgttgtctgaagctaaaaatccaattcaaattttaacgaaaaagtaccctgaaaagtacacaatcaatctattttaacaatgaaattgatctatagttttatgctgatcctttgcggatttgcattgacaaacgcacagcagacttacacggtagaaggaacagttcaggattttcatgataaaacgatgctggaaaatgcatccgtgaaaattggagatttttctgcaaaaaccgacaaaaacggtaagttttcaatcaataaaattcctgcgggaaaatatatgctcattgctaaacatcctgattgtaatgattatactgaaaatgtaggagttacacaggatttgcatttaacaattacgcttgaacatcatattcaggacatcgaaacggttaccatacacggaaaccataaaaacaacggatctcttgttattaaaacacttgataaagccgaaatcgaaaaatattcttctgaaaatctgggaaatttattgacgaagatttcgggagtcagtgctttgaaaacaggaaataatatctcaaaacctattattcacgggctttacggaagcagaatctctatcttaaacaatggagtgagacttgctgaacaggagtggggagtggaacacgctccgaatgtggatattaataatttccagcatatcgacgtcatcaaaggcgcttcagcattgaagtacggaagtgatgcgattggcggagtcgtggtgatggaaccggaagtttttcctaaaaaggatactttaaaaggttcagtcggtcttaccggaatttccaacggaagaggaatggctctggatgcggatgttgcgaaaatctggaaaaacggatgggcggtaaaaacaggaggaagcatcaagaaactcggagatcagaatgctccggattataacctgatgaatacaggaatggatttttcttcgtttaattttaccgttcagaataatacgtatgaaagaggaatttctttcgattattatttaaccaaccagaatataggaatttacagaggttctcatgtgggaaacaatgaagatttttacaacgcaactaccacaaaaattccgatctatacaggaactttcagttatgatatagataatccgagacaggtgatcgagcatcatattgcgaaagtttcggctttcaaaagatttgaaaatatcggaaaagtttctgcgacgtacagttatcagtacaaccacagacaggaatatgacatcagaagaggggagctgaaagatacgccttctctggatctggaactgatgacgcatcagtttaatcttaatgatttgctggagagagggaagttttctctggaaacaggaattgatgcgagctttcagaacaattattcggatccggcgacaaaagcaagacgtctgattccgaactatgataaatatgcggcaggtttttattctatttttaaatataaaatctccggcaatttcaatgtggaggcaggagcgcgatacgattttacgcgttacgatgttaccaaatggtacgataaaagtgattgggagaagagatatgcagattcttatcctcagttttatgtaaaaacggatcagaacaggattcttacgcgtcctcaactgaattataacaatgtatctttcaatgcaggattagaatatcgtccgaattcatcttttgatctgaaattcaattatgcaaaagtgggaagaacaccgaatattgcggaattgttttcagacggactgcatcattctgcttctgtgatcgaaatcggagatatgggactgaaaaatgaacagggacatcagtttaatcttacggtggattcgaaattcaatgttttaaaaggattgaatgtttctgtaaatccgtacttttttatcaccaaaaatttcatcaacgaagttcctacaggagttcagaatacaatcagaggagtatttccggtgtggtcttatcagcagattgatgccaaaatgtatggggtagatctggacgttaatcttaaacttacggatcatcttacttatgtaggaaagggaagttatgtttacggacaggacgatacaaacaatgttccgttgattttaatgatgcctccgaatttttccaatgcattacagtttaaaaaggaaaactggaatcagttctattttactttagaaaaccagacttttcttaagcagaacagatttccggtgtataatgcaaccataccaatatatatagacggagatgaagtggaaaaaacggtggatctcagtactccgccaaacggttattctctctggaatatccagacaggaatcaacatcagcaaaaatctttctgcgggacttatcgtgaacaatcttttcaatgttacgtacagagattatctgaacagaatgagatttttctcggatgaggcaggaagaaactttattctcaactttagatacagattctaaagattttaaaaccatcagacaaaatatcaactttaaaattttaaaaaaatgaaattattcaatactaaaaatatcatcaaattattagctgttttattcatcgccatcaccgtagtatcttgtcagagagacggatctgcggcagaagacgatcttccgcaggaagaccttaccaacattattttgaatgtgaaagatgttgcggcgggaactacccaaacgtataattatagcatgggagcgggaggagctcaggcgattaaattaaccgacggaaaaacctatcaggtaactgcacagtttaaaaacggaaacgaagatgccactcaggaaattaaggatgcaaaagacgaacactttttaatcttcaatttcccgaattctgatattaccttaacgcgtacagatgatgcttcttctacaagagcagatggaaaacgtgtaggattaaaaacagaatgggtagtaaacaaagccgttaaaaacccttctgctacaagccagcttatctttactttataccatgaaccggcaagtgtaacggaggatccccagacaaccacaaacggagtaatctacggaacgcaggtaggaggagaaacagacgcacaggcaaactataccattacgaattaaaataaccttttaatatctttaatcttgttagcaaaaaccaccgtaatttttccggtggtttttctatttaataagatttggcgttttaagttcattttaattgatattttttcataaaaattttatatttttgcaacctaaaattttaatcaataatgaaggttactgcaaaaaaccatgatgatgtaagtgcattgcttacagtgacattggaaaaatctgactataaagaaaaagttgataagcaattgattaattatgctaaaaatgcgcaagttcctggtttcagaaaagggaaagtgcctttgagtatggttagaaaacaatatgaagcaggtattgcttttgaagaaatcaacaagcagatttctgatgctttaaacaactacgtaaacgaaaacaaactaagattagttggtcagccggttccacagccagtaaacgaattcgattacaatgcggatcagcttgaagttgcttttgaagtaggatttgagcctgaattcactattgacctggctaaatatgaagctccacactacaaagtagaggcttctgaaaaagaaatcaacaagagtattgagaacatgcagaagcgttttgcagagcaggctcctcaagaaaaaatcaataaagattcttacattgctttagaaatttctcaggttgtggaagaagatgcagaaggagagcaccaccaccatccaaagaacgttaccattactgctgaaaacaaagaagctttcaaactggtaaaatctttgaaaatggacggttctgtaaaagtttctaaagaaactcttgctgaaaacgaagaactggctaaagaattaggattctctaaagaagaagttgagcatttacaccacaacgaagtggaagtaaaagtaaaagatttctacggtcttaacttggctgaacttaatcaggaattattcgataaagtatacggagaaggaaacatcaagtctgaagaagaactgaaagaaaaagtaaaatctgaattagacgagtacttccagcaaaatgctgatgttcactttgtgaataaagtattggagcaggtttcagaaaaagaagaagtaaagcttcctgaaacattccttgtaaaatggttaatgttctctaaccagaacatccagtctgaagagcatgcaaaagaaatccttgaatctgagaaaaaccagttgaaatatcagatcatcgaaggtaaattaatgacggataacgacattaaattagactatgctgatgttttaggacaggctgaacaattggtaagaaatcaattagctatctacggaatccaccacttaggagatgaggagatccagaaatatgcggttgaaatgttgaaagatcaggagcaggtaagacagatttcttctgaagttgcgatgacgaaactgaaagatgtaatccttgaaaaagcaacgaaaaaagaaactgccatttctcacgacgagtttttggaagaacttaaaaagtaatttattttactgtaaatatttgaaaaccactgtttttgcagtggtttttttattgagtaaacatctgcatttatttgtttaatattcctatatttacgacactaaactttatttatgaaaaagatcatcattccgtttttttgcgctgtgcttttttctacttcggtagctgcacaaaaaactactgctgctcccgctaaaacggaagctgtaaaatctaaacttactccaaaagaagttatcgataaatatcttacggcacttggaggaaaagataaacttgaagcggtgaaatccattgtgatggaaaatacaatttcgggggctgcgcttccgggagaaatcacgatgacgaccaaaaaaatgggcaataaattcaaatctgaacagttttttatgggacagaaagctgcttctcagtatttcgacggcgaaaaaggatacatggagcagatgggcaacaaaagcgaaattccggcagataaattgggagatttaaagaatgggaaaattattgatgctttaggatacgattacaccaaattcaaagatgttaccacagaaaaaatcgacggaaaagattataatgtgttaacttccgataaaggaaaattctattttgatgcttctacaggtcttttgtataaagcagatgcaaaagaaggaacagcgtttacaaaagattatttaacggtagacggaattaaattcccttccttaattgaagcgcagggtggcggacagaccatgactattaaaacgacaaaagtaacgatcaattcaggagttacggatgcggattttaaataaaaaattcgctatttaacataataaggccgggcaatgctcggcttttttgatgataccacatttttaactaaagtttaactaaaaaagaatattctttaacagttgaatttttaattttgccacattataacacaaaaacatactgatgagaaaagattacattactttggcttgggattttcccttttaaagccgttttctatcttctgaaattcaatttttttagcttaaaattttaacgataattaactcgaatttaactttaaataataatttgaacatttcctcgttaagtgaataaatcatatttttgaaccataaaaattaataatcgaaacaactatgaaaaaaatgttttcgtcgcttgcagttgtctttctgatgtctgccaatgcatttgcacagaatattcctatggatccttctgtaaagaccggtacacttccaaacgggatgaagtactacatcagaaaaaatacattaccagaaaagaaagtagatttcagactggcaattaatgcaggatctatccttgaggatgaaaatcagagaggtctggctcacttcatggagcacatgaacttcaacggaacaaaaaactttccggataataaacttgtcgactttctacagtctatcggagtaaaattcggacagcatttaaacgcttacaccagctttgacgaaacggtttacatgcttcctgttcctttagacaagccgggaaatctggatgcaggtcttaaagtgatggaagactgggcattcaacgctaccctttctgatgagcagatcaataaagaaagaggagttgttttggaagaattaagacttggtttgggagccgacaaaagaatgtcggataaatatcttccgaaattactgtataactctcagtatgccaacagacttccgatcgggaaaaaagatgttctggaaaacttcaagccggatgtcatcagacagtttcataaagactggtacagaccggatctgatggcaattgtagtggtgggagacattaatgtggacgaagttgaaaagaaaattaaagataatttcagcaaatataaaaatccttccaaaccaagagaaagaaagagcttcgatcttccgaaccataaggaaactttggtggctgtcgaaacagatccggatgctacaagatcaatggtacagttcatcatgaaagattctgaatcttaccagcccgatgttacagtagaacagtacaaccagagtcttgtagaacagattgcttcaaccatgctgaataacagattaggagagctggtaaactcaaataatcctccttttacatacggttatgtttatcacggcggaacctatgcaagaagtaaagaagcttttcagggaatggcaatggtgaaagacggaaaccagcttaatgctttaaaagttcttctggaagaaacggaaagagctaaaagattcgggtttacacaaacagagttagacagggcaaaatctcaggtaatgtctaatattgaaagaacgtacaacaacagagataaaacggaaagtgatatccttgtagacgaatatgtaagaaacttcctggagcaggaaccaatgccgggaattgcatgggaatatgaagatactaaaaaattcttaccttctgtaacgctggctcagaccaatgaagtgattaaaaaactggtaaaagacgacagcagagtagtggtaattaccggtcctaaaaaagacaacgttcagatgccgacggaagcgatggtgctgaatacttttgaaggagtgaagatggcagatcttaagccttatgaagaaaaagctacgattaaaaatttagtgaaaccgtttaaatctgaaggtacaattgctaaaacggaaaacgatgccaaattaggaaccacaacatggacgctgagcaatggcgcaaaagttactttcaagaaaacagactttaaagacgatgaaattgtttttgcagcgagaagtttaggaggaagctctgtaattagcgatgccgattttattaaaacccagtttgcttttcctgcgctttctgaagcaggtgtaaatggtttttctaaagctgatcttaccaattatcttgcaggaaaacaggttaatgtaaatacttcaatcggaaatgtaacggaaggagtttccggaagaactaccagaaaagatcttggaacagcaatggaattaatgtatgcttattttacaggcttaaattacaatcctgatgcatttaatgcttacaaaacaaaacagtctgcgatgatggataacctgttgtccaatcctcagttttatttctccagtgagcatgcgaaattcatgaatcagaaaaacccgagatttgtaggaattatccctacggaaaaggaatgggcaaatacagattacaaaaaagcatacgacatttataaagagaaattctccaatgccggaaacttccagttctattttgtaggaaatattgatgaggcaacatttaaaaatgaagtgttacagtacattgcaagtcttccttcaaacggaaaaacttcaacgtttaaagatacgggttacagacagatcaccggagattattcaaaggtctacaaaaaaggtaaagatcctaaaagtatggttaccattgcgtacagcggagaagcgccttacaacgaaaaagaagcactggctttagaggctcttggagaagtggcaaccattaaggtgattgaaaaactgagagaagatgaaagcggaatttatggtggcggagcaagaggtggaatgtacaaagttccgttcagtaattacagtttcagcatcaatttcccttgcggaccggaaaatgctgataaattaacgaaaagtgcgattgcagaacttcagaagttaatagataagggacctgaacaaaaagatcttgataaatataaggaaggagagtacaatgatgataaaaccaatatgaaagacaatatgtattggataaacgcgcttaccaaaaatcaggttgatggaagcgataaatatgaaatccttaactatcaggaaaaagttaaagctttaacggtaaaagatcttcatgatgttgcgaagaagtatcttacaaaaggcagaatcgtggcaaccctgatgccggaagacggttgggaaaaagccaaaaaagaggatgctaaagctgaaacaacagtcataaaagccggagcagcaaaataattttcgatataataaagttcaattaaaaaccgttctgtaaattttacagaacggttttgctttattactgttaaggctgaatgcaattaagttaaagttaaaaaaaatcttaaaacctaaagaccttacaactcaacaccctcaaactctcaaaccctaaaaacccgctcactctctaacccaaaattaagatccatgctccttcttccattcttcagcgacttcactcagaacgtcgtaaaattcttcaccatattttcggatcaaaggcgttttcaggaatttatacacaggaacctgcaattcttttcctaaagtacaggcatcgctgcaaatcttccagacatcatagtttagtgctttgaaggtagaatattctttaatacggatcgggtaaagatgacacgagatcggcttctgccagtctactgcgccatcttcatatgccttttcaataccacatttcgtaattcctttttcatcaaaagttacgtatgcacattcgcggttttctaccattggtgtaacgtacattccgtccatcggatctgtcgtccatgttccgatcttttcgatggattttatgccttcttcggtaagataaggcttcactttctcaaaaatagaatctaaaatttccagttcgtccttatccaaaggagcacctacatctccttccacacaacacgcacctttacatttagaaaggttacacacaaactcttcagaaaaaatatcttcggagatcaatttatcgtctatctgaatcataatctttaaaataaattaaaataagttccggctttaaaaccgattaaactgaaaataagcagccacaaaccgacctcctgcatccagtatttcggcagaaaccgaagcattctgctaataataatagtggaaggaaaggcaagaagaagtaaatattcgtagtttttattcatgtaaagaataatcgtaatcagctgagccatcgaaaaaacaagcagaaaagtatatttatagcggcttatcgggctttttttgttataatttctgaaatgatcgtacacagcgtagatcagcatgccaattacagggatcaaaggcagaagttctgtataatctgtcactggtttcatcttaccgaaaggaaaataatcgatattccaacttttaaaatcaataaaaaacattaccgaaaaataactgaaaacaattaaaataattcccagcaaaaacctgaaaatattcagacttattctctcagaagtagcaattacatgaataatcacaaaaacagccattggccatgttgtcggaagaaaaataaaattcagggcaacaatggagcctaccagaacataagatttttttcggatgtcctcattggtacttgtcaaaagcagcaaaagaaaagaattggtaagcagtgcaaccgcaattccgatgtctacatttccgggatacagcccgaaaacaaaaaaagtatataagaataatgggagatgcgtctgataattgagcgcaatactgtgaaaacagaaatatcccagagcaattcccagaaacgtaattccggcaataatcccctcataagtgttgaaattcaataaattaaaagttattactattaaaagaagaaaaccaatataaacaggaattgaaaaaatattgctttcttttgaaagtaatttaaacattttttataaatttgtacaaagttaatttaaaaaaggaaaataatgacgtctttctttctattcttaagcaaagttttcaaatggtctttcggtttctttgatgctttcggtaatgttttgaactggattctgtttatcgtttgttgcgtattgttcacttactggtgctatgttttagtagttactcttggaggtgataaagataaagactactattctccaacggaaggtaagaacccttactacgatccgaaaatctacaaaaatgaaggttaattaattggttatatagtaaaaagccgatcaaatttttatttggtcggcttttttattaacgattaaaattactttttagtcatgtatcggaagcaccagaacaggaactttagaatccttcgtgatcccttttgttaggctccccacgaaaacatcataaatcccgcttcttccgtgagatcccatcacgatgaaatcggcttttttatcttctgcgtgttccagaataatatcttttgcaattccctgtttcagaatatgttcgcattctacctcatgcgccagaattctctgctgaattttgttaagctgaacaagctcttcccgaatctcgttttcctcaacttccggaaaatactgaaatcccatatctcctatggcaaagccgatatccgatggcgcaacgtgaatgatataaattctgccgttaacctgcttagcaaattttacggctccttccagaagctgttctgtcttgtccccaaaatctacgggtaatacaatatttaccataacctttaattttgtttactaaagataggaaaattatgccagaaattatgttaaattacttataatattcggatgccaagaactttttcatcttcaagataagcttctagaatatcattttcttccactttacctacccctttcggagttcctgtgaagataagatctcccactcttaaagtaaaatactgcgatacaaaagcaataatatcatcaatggtgaacatcatgtctttcgtattcccgtcctgtaccttttccttgtttttcagtaaagaaaaattcagcgattccagattgaaattttcttttttaaagaaatttcccactactgcagaaccatcaaaacctttcgccagttcccagggcagccctttggatttcagctcactctgaagatctcttgctgtaaaatctattcctagcccgatttcctcgtaatgtttgtgtgccgtttctttctggatgtattttccgccttttgatatttttacaacaacttccagttcgtaatgtacatcctctgaaaactcaggaatgtaaaaatcattccccttcaaaaccgctgtatccggcttcataaaaataaccggtctttccgggatttcgttgcccagttcttttgcgtgttcgctgtaatttcttcctatacagattattttcatactcttttattttgtctttgcgagaagcgaatgcgacgaagcagtctcagactcacattatttaataaatttttattttcaacgatcgtaaacttccattctccatcttccaacttccttcttttttaggagctttttcccgctttccactgtatcttttttgttacgggctccgcttctctccgtccgcaacaaaaaaggatgccgtttcaatcggggctatgagaagtgaagggacaatttctacaaattaatcatgaattttccaatgtataatatttatttgtaaaagaaaatttattcctcattgattataaatcatcacttatcaatcatcaatcataaatcatcaatcataaatcatcaatcataattaaagaccaccccgtcaaaaattcagatgaattttcgccacccctccaaaggagggtaattgtaacgccattaagttgtcgtacaaataccaatacaaatatacagctcatttgctgagtgaagcgtccttgcgaacgaaaaatatccacaatactttcaaaaagacattgcgaccattccgttaaaaaatattacgtcactttctaaaaccattaatgcgtaaactcatttccgcaataataacagacaaatttatggctcgttaaaatcgaaattccgaaaaaactggttgcgctattgtctctgtaaatatggttagaaccacatttcggacaaacgaaatcaaattcaggatctgcaatggtgtgttccacttccagagaaaattcttcgttttctttgtaatctttcaatgccagattggctttttcaagatcctcttcaaaaacctgaagctgaattccaccaactgcctgagaaagcagccagtccgactggatcagctgttcgttcgcaataaaactgttgatgccgctttccgcaagaatctgtttgtcccggttcgcctgaagcgccgtttcgtaaaatttgaatttaaccagttcactcattatttaaaatttatttgataattggattttaaattcccgtacccggctttccggtatcggttttcggtttggaaatcaaagcatcaaacttttccagttctatatttaatcttgtgataatacccgcaatgacggaagatgaagaaggtacaatttccggcatattttctattgcggaaataaattttcggtatcttgctgttacaggtttacgcagcctgtagaaagggcttatgtctgccagttctttggcagaatctcctctgtctttgtagaaagcctgaaagctttcgttacagttttttatatgtaaaattctggaagctaaatccagaaggttaatttcgtctgttttggcattcagcgaagaaataagattcgtgagaaccgcagtctcaccattaagattaaattttggaattttactccctccaaaactttctataatcgccagtaaagaattggcggcttccacttttaaaggctcttcgtcgttgtacgtttcactttccagaaaagatttcagtctcatgaaggctctgtctctttttttgtctaaagccactacctgctgtgtttcctctgtaagactttcttttttaaaggacagtttcatttcaggaatgtctgcttttagggcagctgaaattgtagtgagctgaggctccgtatcagaaattgagatgacgttctcaatgagctgataaaaatccttattgttcagtttttcgatgctaattttttttactttttccatgttttttaaatattgttattttttaaattaaagcctgtttaaacttttatttaaccataaaccgaaggttcgacataattaaaagtcacaaaagatgagctaaacttatttaaagttggtgactataaaaatcttcggtttttattcttttgagctctttaaatataattatcgcattatcattgtcttttgtcccttttgcggttaattccggattagcttgaacatgctgttaataagctatgcaatttaatataaactcaacagcttgagatttattttatagtaaacttttaaagtttacagcaattgtaaaacttcatactattagactgcattatttaatagatggaagaaagttccgttcctttgcgccggggtattcaatactttgttgaaagtttcttactactgcattggagcattcaatattttgttcaaagctccgtactttagcgcaggatgattcactcctttgttgaaagctctgttttgttgcgctgagtcattagaaaatcttttgaaaggctcaaaccaaaaaacgtgggctcagcccttattttttggctaaaataataaatattggttaatggtgaaaaaattacagctaaagattattagtttttgcagactgattttttatttatatttgtgggagaacaaaacagaaatttataagaatagacataaaaattttacataaaataacatatttcgttaagcagatcattttctaaactcaaatactcgaaatatttaaaaccaaagaaaatggtgccccgatcgggcgtgtttttgcttcatttctttggtgggttatttgagtaacctgagtttaggttgtaagtcaattcacgctttgttttttgctataaaaagagttatcaagaattaaaagcattcacttttccaacctttttcaaaaaaatacatctcttataataatacgacgagttttgtcgtttttagggagtagctttacggaaaaaaacaaattatatccaatgtagataataaataatttaaactttaaccaaaaaaataaaaatatgatgaaatgaaacagtaaccattgaaaaagcaattctgtaaaatataggttttttacggattgcagaaaatgaaaaaacaacatttggagcgcctcctatgttaaaataaaatttaaacccaaattatcaaacatgaaaaaaagcatttcgacagctgcactcttccttttcttcggaagcagcttatatgctcaaagcgtaatttttgaatatgatgaagcaggaaatcaaatattccggggaatatgcgacggctgcaaaaattctaattctgaactattttctaaaaaacagccacagggatctcagccccaaacgattgcagagaaagttgcgaaaagtatacgtgctgctcctgttcctgtaaaaacagatcttaccgtattgtgggatgcagaagtcaaggattatattaccaaaatagaacttcttccttacaacagttttaagattctgaattttgtagatgtaagaacacttaataataactcttatattttccgtatggaaagttatccttatggggtatattacctgaagttctatctctcggaaggcagtgtttacaccagaacagtaacgaaaaactaaacacattatgaaaaagtttattatactatttataggcttatttgcattcagcagcctgtacagtcagaacagttttcacgacacgcaaggaaagatagaagtaaatgccggagggcaattacagtataccttgcccatagaccttccacacggagtaaaaaatgtttcacctaatattagtttgatctatttaagtaattctaataatggtattgcaggatatggatggacaatttcaggactaaccgctatcaccagaacaggaaaaagcattgaaagagatggcgaaataaagggaatccaattagattattcagatacatatagttttaacggacagagacttattctcgctccagaaagccctgctgcttatggacaagatggtgcaacgtatgtaacggagaaattttctgctataaaaataaaatctttaggaacttatcctgcaaatggacaacttgccggacctgcacaatttgaagttacgtttgaagatggctcgcaggcatggtatggagcatatatgggaggggtaagattcagcccaattgctacaacaccttctgaatataatattgtaaaatggagagatgcccaagggaattatatttcatacaattatgaaccttcttcaaatcaaggaggatttcgaagtgatttaaccgtggttagaatatcttctatcttttggggaggaaatgaattccttaataaaccacattataactcggtggagtttatctatacagacaggaacttaaaagaacaagcttatacgcagggtttaagatttatacaagataaaattttgtcgaatattctcgtaaatacgaatggatcacaatttagaaagtacttgcttgaatatacaaataatggcaccaattaccagtttctaaataaaattacagaatataatgcgaataatgaagccgccaatcctgttaccttttcatatcctgacagagccggaactagcattgccggtgcaaactttggttcctctacgttagataatgttaaacttaccggagattttaatggagattcatatatagatttcataatgtctgatggtacagtaaagatgggtgcttttaacgatgatttttctacttttacaagcaatatttcttttaataataatgcggttgtagtaccttcattgttagacgaggaaggacagatttataacggaaatggtattgtacaatatatgtttgacaaagttgaaggctatatttttagaagtaatacttttgtaaaagtcttcgaaaaaacagttaccccatcctgtacatcctgtacagccaatattaattttagcgaaggagatgtaaatggagatgggatatctgatctatttcttactttcaccaatggaggttttcaggatagatttataatagatcttaaaaacgcaaacaatcctgtttttacttattcaggagatggaagttttagtgagaactcatacaccaatcaaaagtatctggatacggatggggatggaaaagttgatattatcaatatttccgataccacgtataccatatttgagtttgtaaaaacatctcctactcaatatcttaaaaagattaagtttacgggcaatttagcagaaacaaaaggatctggctttccggtattatacggagactttaatggagacggaaaattggattttactcttcctcttactgaaggaaaaacaggaaaagatgattggagattttatataggcaccggaaacggatttaataatttccgtaaaaatgattttttagtatataaaaatgtcgctactaccaataatggatattgggtacagtacagtaagactttttattctatatcagattttaattccgatggaaaatcagatattgtgcaggtctattcatactcaaatttatcagggagcagctatagatcaattggcgttaccgtaaattctattacttcgaatggcactaatataagtgatggtagtattaatttcgattttgaaaatatttatacttttccatcatcaggtacttttactttaattcagccgtattatgatttagccttatatcagcccattaccaatacaattagatccaatagtaattattataacgtatttctatttagaaaagataatttacttaaaattaaggctcctacttctgttgcagaattatcaagaataaaatctatttcacaggcaggacttacaacttcggttatctatgcagaacttaatcctgacaccaattctgtttattataaaaaagaaaagaaagaatattatcccttcttttctatgcagcgtgcagatcagtcatatgctgtaattcagcttcagcaggctggcagaaagcaggatttccgatacagaggcatgacgggacatttacagggaaggggaatgctgggattcaaacaaactgcgcgttcctcgtggtatgcagacggttttgaaaataccaaaatatggtctggtgtagaaacagatcctcaaaacgaaagtgttccggtaaaagaatggtcaataaaaaccaatgacgaatccaaaatcttcccggcagatatttcggaaaataatcctcagctgctttcttataaaggaactacttaccagacagacaagctcttaaacggacaggtagtagccactgttgccgatgccgataaacccaaagtggtaacggctaccgttcctaaaacgacaagaacaaaagattttataaccaatacccttgccgtcagttccattacgtatggcaattattatcttccttcacagacagtatccaatatcaataacggatatgctgtaaatacaactacgtatgagtatcttcataatctatctggagcgggaagcagttattttactgggcgaccgctttccaaaacagaacaggttaccgcttatggagatactcaatctgctaaagaagagtacagctatgataacaatctgctgaaaacagtcaaaaaatggaataagaataataccggatatgttttggatacctattcctacgacggttttggaaacattatccaaaaagtaagtaccaattcaacggatgcgcaaagcatcacagaaaagtctcagtacgaagacaaagggcgttttgtcatcaaaaaaacagacaatctgggactggaaacactgcttacctataacaactgggggcagacccttacccagaaagatccttttgggaatatccttaccaatacctacgataactggggaaaactgctttcttccaataatactttgggaggtactattaactatatttacgagaagctttccggtaatgccggtaccaaagtatcagagttttcgccggacggagatgtaaaaatagtctacaccaatacactggggcaaaactataagactactacaaaagcatttgtacagggtaaatacgtatctgccgaaactcagtatgacgttttaggaagaaagctgcaggagtccgagccttactttgaagggcagtctgcctcccagtggaatacctttgcctatgacgataccgtatatcctgccaaaataacagcaactgcttttaacggcaaaaagatacaaaccagtatttccggcagcaccactactgcaaaggagctgaacggctataatagaaccaccagcaaaacaactgacgctctaggaaatgtaataagctctaccgacaaaggaggaaccattactttctcttacaatgcagcggggcagcagataaaagcaaaatacggaaccaatattgtagtaaccggatacgatgagtggggtagaaaaaagagtttccatgatcctgccaatggattgtataactatgaatatactggctttggaaacattaaaaaagagataagccctaaaggatataaagaatatatctatgcatccaacggactcccggttcatgtaaaagaaatatccaacgacggagtttctacgcagaaaaattatgactttgaatataatgcttatgggcaggtcatccaaaaacatggtgaagctagcggcagatattttgagcagaatttctcctattctccaaacggaaggcttaccgcacatactgaacagtttgaagggaaaacattcttcaaagacaatatacagtatgatggattaggcagaatttcacaattccatcagggtttacaatcttcgggtaatacaactgaagtaacggtaaacaacaattataacagctggaatggagacctgaaatccctaaccgatgccaacagcggaaaaatcctttaccagttgcaggataccaacgccaaagggcaggttttgggagcgtcattaggcaatacgcagattagcaatcagtatgacaactttgggtttttgtcccacgtctcccatatttctggaggaacggatcttatgactctggactatacttttaatgctataaaaaatgaactgaaccagcgttcgcaccagaatttcgggattaatgagacttttcagtacgatgataacaacagactggttaactggacaaatcctaaaaccgggcagatgtccttcaattcttatgatgagacaggaagaataacctttaacgaccaattgggagaggtaggcttcagtattggcggaaatccatacagggttgccagcattaagctgaatcctgaaggaatacagaattatgaccttaatgggcagagcaaagttgtacagaaaataaactataatgaaaacaacgaccctgtaagaatagacggtacccgtggcgattatgcttttgaatacggattgtccgaaagcagacagatcatgtactatggaggaaattttggtgaaaatgcagaagctaaatacacaaagtattacaatgaaggaggagatgcggagattattttcgatcaaaagagcggaaaagaaaaacatatcctctacgttggcggttctccgtatgaaagcagcattatctacgtaaaggattttgaagacaacaaaagttacaaattcctgcataaagattatctgggaagcattcttgcgataagcgatgaagacggacaagctgaagagcgtagacattttgatgcatggggagtctttacccatttgcaactaaaagaagaaggtatatttaaaggacaagcattagaagattttttggcaaacaaagccttcgcctttttaataatagaccgtggatatacttcccacgagcatctgcatgaggtagagcttatccacatgaacggaagactgtacgatccgcttttaagaagattcttgaatgctgacgaaaatatacaggatcctaccaatacccagaactataataagtatggctatgtaatgaataatccactgatgtttaatgatccgagtggagaactttgggaagccggatttttcttatcctatatagcaccagtactctattatgctgcaataggagcaatagtctctgccggaatatatacaataaaatctttgataaccaataactggacttggggaggttttggtaagagtttgttaataggtgctgttacaggagctatttctggtggattttctgctacttttgcagctacaggctttaggggtgctgtggtaatggggagtgtgcaaggcgcaataggcggtagtgtagatgcattagtaaatggcagaaattttgcaaaaggtttttatacaggaggtttagcaggtgctgcaatggctgcggtgagctatacagttaattattttgtgagtggaagttataagactaaatatatgtctgtgaaaggaaaaactacttataaatacgatcctaatataacctctaatgaaatgcaaatgaatataaacaatgagagaagtgctaattttactattgaagaaaaaaatgaatttggagtaggatcggataatatagccataaacaatataagtccagatggaacattaaattatggagatggatcagcatacgcttatacaacaccaaaaaattttataactggattgtcagatatatactattcccctgttgcagcacaaaataaggaacttttatcattaactatggttcatgaaactggacatgcatactttgctaaattaggaatgaaagatgaacctacaaatcttgcaataggacccaattctacggagcattttgcaataaataaattagaacatatttatgcgtatagaaatttctattcaactagtaatttaagacctcctcttttttatcgcccttcaacgcttatagatgcatattttaatttaaattatcatcagcaacaattagtagatatggcttatcaaaaactttaccctgtatttgatagatatatgtcttttaaattttttaattactaatttgatataatctgtatatgagaaataacattcaacatattgtaaattatataattgaaattttattaataaattataattatgaaaaatatattttttatctttttttatcttttctttattaatttatattcacaggattttaaatactgttatagtgtaacagaaagaatagataatactgaaagcatcattacatttaatagtaaagatgggatttatagagatctatattgtttgaatggagaaattcttgacaattattcagtaaagataaattttactgatgaagaaaaaatagaaatagtagattatattaaaaatcataatattaacagcttagaatattgtaatgatatttcttatgcaaaattaaaatctactttttattttgagatagaagaagataagacaacagaaaagaaatgtacagattcaaaaaaatcatacaatattagagaacttcaaagaattttttttaatattattcgctctaaggaggaatataaaaaggtattttactgggaatttatcaaaaagtaatagataataaaatactatgaaaaaaacaatattagcaagtctactagcaatctcgcaggtagcattctcacaagtaagcctatccagaaataaacttataaaagatgggcaaccctataaagcgtctcagtacaaagaggtctttcaaaatgagcatgctttgatgtattataagaaagtacagaaccaatagcaccgtatctcagatttttggggcattaggtggtggttgtatgggatatggtctgataaaagtgttagacggtggagaaaaactggtaagtgagtagcccgcacagaaaaaaccaaaaatgagggctggagcatggtaggtataggagcaggtttggtagccatagcaatcccttttgctatttcttcaaagaaaaaacctgaacaaagccatagatgcagaaaatggtaaagaaacagctttccgaccatactttaagttagaaaatgcaggtgctggtttggcactaagctataatttctaaatagtcattccttaaaaagccagtttctcactttgaaaattatacttggctaaaaatattcggagaataagttcaagccaaagaataatttgttttttaatttggtttaatctcatctttaaattgaagtcatttaaacttttttctttggaaaaaaggctgagatttaagatattgtatttgcaaaaaaaaactggtattgtactgaaaaatagttggtgaaattcaggatatattttaataaattatgcacgttaatccgaagaggacaaaagcactggtggagatcaacttttcagcaataggattaatgttcaaaacgatagttttaaggtgaggtttcctcaccttttcgtttattatcggatgaaccttatggctaaaaaaactctatttttcgttagaaaaataaatataccatttgatgaaattgattcggtttttcaatgtgagacctctgtgcaggtcgagatgattttttaaatggctgaagtatccttcaataccattggttgttttaggaatattgggattttccagataatgaaacatattgggcgatgcccgctttatagtaaaatacgatcgtctgagaagcttgtgggtataccagtatctctcggtttcaagattaattgttttttcgttaatatagagctcatttaaactttttacttttcttcagtccaatcacaataaacgcgatataatttaaatctttccaactgatcacagttgtgtcatatctgttcaggagtgatctgaagctgtccagccaagcgtttgttctttcaatagagtatctttctttgtaaagttccggatcgaagtagatatcatcttctattgttttgcttcttttatttctggcaaagttcgggatcattccatactgaaagcatagtgctctgagcctaaggcaatcaaaaccagaatctgcattcataaataaaccatccacactgatctttgaatccttaagtatagaaatcacttcgttaaaatgagtatggatttcataggtgtcatggtgctttcctgcttcaggttcgctcatagccaggggaattccgtttttgtcggtaagatataaagagttcgttgtttttcttttttttctgccctgatagcttactttttctccacctttgnnnnnnnnnnnnnnnnnnnnnnnnnnnnnnnnnnnnnnnnnnnnnnnnnnnnnnnnnnnnnnnnnnnnnnnnnnnnnnnnnnnnnnnnnnnnnnnnnnnnatcaaaaaaacaacttcccaataaaataaaaagcttattacggatttttaaatcttgtaataagctcttatttttcatcctaaataaataggctgtcgtaagatgcaaggtttttcagtgacctcagatttagctgcttttttatttttatgagatcacttaacaattccttttagagataatggaaatatcgtatcaaattttgaaacatttttatttgtgattagaaaaaactgtttaacagtaattccactatctttatacttattaggatcatatttaatttttatgaaaattgtgtcgtttttgaaataattccctgctcttacatcactttcagtacaatcgcaaccgtctctaacaccatatacttttaggctatcatattttttattaacatatttaaaagtatattcgtacaaaggaactttgtttttatccaacgtaccaaaatcatgtattaaagtactcttagtatcattaaaaacaattttctccgaagttttataagtgagtaagcataaaattagtaatgctaataatgcaataatgatatacagatattttttattcattgtcgctttttctttttttcacataaacttccaagcctatcattacgttagtaaatgaacttttatctttagataaattcggtattctttcccattctttgctttcagaaaatcttgcataagttaaattttcttcataattggtaagtcttattgcaggacctatttttttgtctcctatatttcctaaccattttacacttactaagaccccttccttaggaaagggaatatgataatcctcaatattgatttttacattttccttatttctatttttaggtgtataaactatcttttgattattcagcttttccaaaggtttttctgttaaagaatctatcttataaatatttatttcaaggtcaaccaacttaaattttttatctgtgtcatgtaaaaacaaagttatatttttaatgattccttttttttctaaattatttttaaatttaagccctaattcgtaagtagattgtccagctccgattaataatttagtatctgtttcttgttttaaagcaaaagagtaatctactttttcgtaatccttgtcataaataattacttcttgaatatctttatatttttgtcttatagtatctattcttgtttcttgagaatacaggaatactgaagaaaaaataaatataaattgataaataatacttcgattttttttcatcattatttctttcttttaatatatacttctaaaccaatcatggcattagtatacatatttggctttcgtgaaatatttggaattctagtccagttaccatctttgtaacgagaataacttatttgttcctcataatcggtttctcttagagacggaccaacttttttgtcattaaattcatttggaagccatttaatcgatgcaaaaatgccatttaaagggaaaggaatatgataattttcaacattgatttttatacgtcctctacttttgctcttgggaacataaataatctgttttacattaatcttttcagttggctttcctgttaaagtatctactttataaaaattgatttctaaattagttagattgatttttgattctgttttatgtaaaaaaataacgacattacttacccttccttttcttttcaaattattataaaatatcatcccctcttcacgatgggtcataggaataaacctaacattattttcttgttttaaaccaaaataataatcaactttttcataatctttatcgttaataacaacagtttctatatttgcatatttttcagctaatgtatcttttttttgctcttgggcactaataagaatagcaaaaaatagtaaaaaaaaattcgttatatctttcatttctttggaaagagactgccgtatgacagtctctcaaatttagtttttaattattaagcaaatccacttccacatccaaaatcatctcttgtatcccattgaatcaatccccataacatactatgatgtgtgattgtataataacaaccatcactatcaatataaagttgtcctgctccgttacctggttttacttgtgcttgtgtgttgtttaaagatgcacttgccataagtgcaaaagctgacataatcattagctttttcataaataaaatataattttttttcacctacttattttgtataaatcttcaacagagaaaatttagactttcctttcggaggcaggttttcggttacttcctaccttcatattgcgcaatatatctttataaagactttataaaaagtactttattttttatgtattaatggcaattcagaaaagtagaaaagagccatttgtgtttttttagggattcaaatatagaatcaattttttataaaacgaagatcaatttcagattattgtatttctttagaaattattttttatgttaaataaattgaaaaatattaaaaaatcaagccaatgaaaaaataattgaagaactgaaagacaagctcaacaactaactaaaatatacaaaaaagccctgaatttcagggcttttttaatttataattattacatttaagttggatctatttaaaaattacagacatctattttcattatctaaagactaaaattacttttatcaatactttttttacatcaattgatttcacaaactatgaattcaattttttatttataatcaatcttgtgattaagttctataggattattattttctcttattattcttttcatcttatctgattgaactttcatatctggaacaactgcatttcctttaccatcgtcaactcttaaaggaagccccatagatttcatgcgagccaaaggatcagagtagtaattttcagatagttttttgaattgctcccatgttagctcagaccctttatttctgtaacaaactttctcatttccatcttttatttcagtcaaactaaaactataatcgtttttctcatctgaaattttaacaatgaatcctggcagacctttaaaaacataaggaccatcttgaataggaatttcagtagtaaaccatgccgtccaatttctaccgccatagtttacttttgctttttgaacatcaaaagttccaattttattcttttcgggtaaaatctcccaatcaagcttttcatttatctttatagaaaatatctcagaatagattgtttgagtacttttttgaatttcattttcagataattttttaacaatataaaattgatcttcaaacctcattttccttccaaaacccaaaagattcaatgctttaagagaatcagttttcctatcctgatcaattctaaaaactgataatttaccttcattaacatctaaaaaagttttttctaaaatagtactgtcttttaatgggttgggtctatattcaaaatcatatttaaataacttattctgactatggaaattattaaaaagtataataaaaataaaaaataataggcttttaaaaattgtatcttttttcataaagtaaatataataatcttataaaactgaggcataaaatttatgccccaattctactttaacctccaaatggcatacatctgtttaccaactgtccattgcattgaaagaaaccacaaacaagaccatattgactacacccatcatctgttccacctcctgttggcgtacacgtgtctgcacaattacctcctcccgttcctccaggatagagtttcgctccacttacagacttcaattcatttctcgaaagtttttttaaatttttcataatttgatagtttaaaaattaaaaattatttttgttacactacaatttttccggatcaattgtctgatacgaatatgaaaaattctttatacctttaccaactaagaaattaattatttcaattagaaaactaattaaatctaaacatgaatattggaacgaagatcaaaaatttaagagaagaaaaacatctttcacaaactgaactggcttttgaattaggtatttcgcagggaactttacacaacatcgaaagcggaaattctaaaaaaatagatttccttttgatggataaagtttgtcagctttttgataaggaatttgaatattttttagatgctggaatgactaataatgtaaatgaaaatcatgggcaagttggtcagattggaacagtaaacaatttcccagaaaactttctcgaagaatttaaaaagctggttgaaaaaaatcaagccaatgaaaaaataattgaagaactgaaagataaactcaataattccaattaaaaaaaatataataaaagacttgaaaaactcaggtcttttttcattcataatcaattttatgattcagttcaataggattattgttctctctgatttgttttttaagctgttttgtcatcttattaagatcggtcggaataagaatttcctttttcatctcccgattgtatttttatatttctggctttcagctctgcaaaaggatctgcgtaataatcagattgaatcttttcaaagttttcccaacttattactgttcctttttttgagaaaaataaactatctttctccagttttttaatctttattaaattaaagctatagttttcctgatcgtccgaaattttcacaataattccgggaagaccattaaaaacatacggaccttcaggaatgggaatactttgcgtaaaccatgcgatccagcttcttccaccgtactctacggttgctttccggcattcgaaatcctctattttctttttgtcggataatatcttccagttcagattttcatctatttttataaaatatttgtcattaaaaaagcttatgaaaataaccttttggatattggctgtttcaagatttttcacaacataaatctgagaattaaaaaccgggcttctgcctaaaccaagtcccgttttttgtatcatggagtcggaaaccctttcgcgctcgcaacgaaaagcagattccttttcaaaaacatccaagtaataagtttcggtagtaaggtcgggtttattgggattaggcttaaatttaagatcataaacaaaagtcattttttgagacagcatcattgctgaaagtatgcatccaaaaataaggaatacttttttcatgaataattttaaaatcatggtatttaaatttatagctaaattaagatttattaaaatttcatctatcaggaaatatggctaaatcataaaaaacatcctattcaaaggcttttttatttctatcagatcaaaaataattatagattttatttatcgaaatcaaattgttcgatagacgaaatatttctatatttgcacctgaaaatttaaaataaaaaaacaggaaaattatgtctttagtaggaaaaaaattcccgaatgtaacagtagatgcaatgtctgaaatgggtgatgatcttagaatcaacatcttccaggaagctacagaaaaccaacagaaagttcttttattctggtacccgaaagatttcacttttgtttgcccgactgagcttcacgcttttcaggaagctttacctgaatttgaaaaaagaaacactaaagtaatcggtgcttcttgcgataccaacgaagtacacttcgcatggttaaatgtttcaaaagacaacggtggtattgaaggcgttacttacccgcttttagcagatactcacagacaattggctaatattttaggaattgtagatcaggatttcgaatacaatgacgaaggtgaagaagttttcacgggttctaacgttacgtacagagcaacttaccttatcgacgagacgggaaaaattttccacgagtctgtaaacgatatgcctcttggtagaaacgtaaaagaatatttaagattaatcgacgcttatacgcacgtacagaagcacggtgaagtttgccctgcaaactgggaagaaggaaaagaagcaatgaaagcagacagaacttctactgcagagtatttagcgaaaaactaagataatgtgctaatttgaaaatgagataatttgaaaattgatcacattgattatttaagaattatctcattttctatttttcagcattttcaaattaatgaattttcaaattaaaattatgtatacagaattaacagaagatacgcttcagaatattgttagcgaaaatgaaaaggttgtagtacaatacggtgcaacatggtgcggaaactgcagaatcatgaagccgaaattcaaaaaactggcatcggagaacgaaagcattcctttcctttatgtagatgcagaaaaattaccggaaagcagaaaattggcaacagtggataatcttccgacttttgcaatcttcagaaacggtgagttggtgaatcaggtacagtctaatcaggcggaaagtttaattaatttattcaacgaattgtaatcatgaagttaccgatcatcagacagttttatcagaaccagactcctgaaaatcttgaaaaaacattagaagttttagaaagcttcacagaattccgaggaactaccgaagaagatatgaacgttgcaggagaattgattacgaatatctgcggagctctggaagttcacgccaacgtacaaaacggaatgagcgagaaagatgctttaaattcttttgctcagaaggttttaggatcgattgacagataattttaaacacgattgcttttatttaaacacgaatttcacaaatattcttccacgaataaacgcgaatgtttttaaaaacggtgtcatttgtgataaaattagtgccatttgtgttttagtttaaacacgaatttcacaaatgtgttttcacgaataagcgcgaatatttttaaaatttgtgacatttgtgacgaaattagtgccgtttgtgttttagttcaaaccacaaattttacagatattctttcacgaataagcacaaatatttttaaaaattgtggcatttgtgataaaattagtgccgtttgtgtttaaatcaaaccaaaaataaaatcccgatgaaaagacatcaggattttttgggtttataaaatttctattattgaattagcttcttctgctcattaaaattctcaaaatataccagaacaaaagcataatagaagcaaaaagctgtaaagaagctccaacatactgatctgtggtgtaagaatctttcagtttgcttgtctgatacaaaatcgttgcagaagccagaattaccattcctaccgaaaaccaaagaccaagatcgaatccgaaaatcattccgccaacgattaatccaagtgatataaatcctccgattacaataatatttctaaggaaagaaaaatctctttttgaagtaaacgctacaaaagaaatccctgcaaacatcgcaatggttaacattgctgcctgataaatgattgatccaccaacattcactactgcaatgtagatcatcggcataaaaattaacgcttcaagcaaaatataaaatcccaatcccatatactgaaccgatctgctttgcgaaagagaccatttattcgccaatacagaatccagccaaaatattccgataattaacagccaggtaagttttccctgaaacattaatccgataacttctggcggaacggtttttaacaatacggtttctactccaataaaagcaagaatcgccaaagcaacgtgcaaatacgtctttttataaaattctgccttttcaacttctttggcatgtgccactaaaacatctgtcatcatagttttttattttttaataatttacttcacaatcttatacggtttaattcccataatctttccgtctgtttcaaaaactgccgtaatcacctctttcggttcagcggctttatcatcagaatatttatactgaatcattggcaggctgcttccgtcgatcagaggcttgtaactggctttgataatctgaaaagttttatcagtcttaatatctgcggcaagcttctggtaaacaacatctgttaccatttttttagctttttcagataaaagttcatccatgacttttcggtcagaaaccttcagggctgcgataaatttcagaaattttccgttgtagagttcaatttcctctttggtaagacttaaagagggttttacatcggtggctacatttgtgttcgggttcttttttgtttccggtttcacattttttgtcttttgcgaaagaaaaaacggcgccgacaaaacggaaagaactaaaagtatttttttcattatgcttaaactgtttcaataaacaataaacggaatacacgattctgtattgcttatcacttataaattacctgctgtaatccggcattactcctaagattttaccgtcattttcaaaaactacagtaaccagatctcttggaggagaaagcgtatcgtctttatatttatactgaattgttggataagtttcgttatccagcagtttctgatagccggatttatacacttcaaatgtacgttcaaagcttattccgcctgataatttctgaataacattgtctgaaacaatacttttcactttatctgaaatcagattattgacagcctgtttatccgattttttcaatgcatccacaaatttcagaaaatacggatggtaaaagtcgattttatctttactcaattccgaagtaagctctattttcttgctttcaacaacttttattttgctttcctgcgaaaaacccgcctgaaaagccaaagccgcaacaatcagaagtatttttttcataataaaatgatttgctgacagcaagatacaaagaattatattacggataaaaatttcatcgtatctacattatccgcatacgtattcaaccccggattttgggcttctcctaatttaatggaatccaaaccaagctcttctttcgccaccacacactgaatattttcttcgttttcctcaataaaacttttcacttcatccagagaagaatatctgctgaaattgatgacagaaagcggactgaataatttttcatcttccttcagcatcacaaaattattatcccagaatttatcctgatttaaaagataaactgccctgttgtaatcgtaattattggcatatttattatgattgatgatctcctgaaaatccagaaaactttcaaataatctgtcgataacaaaatcctgaggaataaaaagccgggttacatttctgcatcccaaaccgaaataacggaaaatatcttccgccagaagtttaagctcctcttccgtttcatccccctttaaaacagcaatggaagttctgttctttctgatgatattcaggtggtttttaaagtaatactcaagatatcttgccgtattgttgcttcccgttgcaattaccgcatcaaaattttccagtctttctacaaattcaaacgatacatttccttccgaaaattcattccacttttttaataaaaacggaatcatgtatttatcttttgaagaaagcttaatcaccggaatatgattgctcagcaccacagaaattacatcatgaaaacccaccaaaggaatatttcctgcaagaataagccctactcttttcgtagtctttgagatttgatattctttcagccagtcggcaatattatcttccgtcagaagatccgtccactgtttcaaagcaaacttctggttttcaatggtaaaccacggattttcaatttcagatcgtttcagtaacaattcaaagtctgaatcgttatcattataatcttcctgatttttgcttaaaaagtcttttatatattggcttagtctcgtaagtcctaaaacttgattttcggtattcataattgctttaaaattggggaatattttgtaattttgtgcaaatttaaaaaaaattagcgatggctattaaaataactgatgaatgcattaactgcggagcctgtgaaccggaatgtccaaacaatgcaatttatgaaggagcagtagactggaaagcttcagaaggtacagaactgaaaggtaccgtaacattaccatcaggtcttacagtggatgcagatgcgccgcaggaacctgtaagtgatgatgtttatttcattgtaacagataaatgtacggaatgtaaaggattccacgaagagccacagtgtgcagccgtttgtccggtagactgctgtgttccggatgaagatcatgtagaatctgaagaagcactgcttaataaaaaagcattcttacacggagaataaaaaactgccgtctcatcaatcatgaggcggttttttatatacaaaaattcaaaagaactcaataagaaactataaatgaatctgtaagaagaaatttttacaggaaatcccaaaaaataataatatgagcaaaaagcacaactttagcgcaggaccatgtattttaccacaggaagttttcgaaaaatctgcacaggcaattttagatttcaacggaataggactttccctgcttgaaatttcgcacagaagcaaagatttcgtagcggtaatggatgaagcacgcgctatcgtaaaaagactgatgaatttaggagatgattacgaagttttatatttaggaggcggtgctagtctgcagtttgccatggttccttacaacctgatgaaagtaggcggaaaagcagcttatctggataccggaacgtgggctgcaggagctattaaagaagctaaaaaagtaggaacagtagacgttgtaggatcttcaaaagaagaaaattattcttttattccgaaagattacaccgtaggttcagaatatgattatttccactgcacttccaataatacgatctatggaactcagatgaagtctttccctgaagttgatactttaatggtttgcgatatgagttctgatattttctcaagacaattagatttttcaaaattcgatttaatctatgcgggagctcagaaaaatatgggacctgcaggagtaactttggtggtaattaaaaaagaaattttaggaaaaacaggaagagaaaatatgttctctattctggattatgctcagcatatttctaaagaatctatgtacaatacaccgccggttttccctgtttatgcttctctgttaacgttacagcatctggaaaacaatggtggaattgccgctgcggaagccagaaacgaagcaaaagcaaaattattatacgatgagatcgacagcaatcctttatttgaaacattctgcgtaaaagaagaccgttctttaatgaatgtatctttcaaaattacagacgagagcaaaaaagaagaatttgatgcagcatggaaagcagcgggaatcagcggactgaacggacacagaagtctgggaggttacagagctagtttgtacaatgctttaccgattgaaagcgtacaggttttagtagatgttatgaaatccataaaataatataaattattaaatttcaaatacttaacaaatatttaatgttattttaaattttcttaatttgcgagactgtttaaattttgaaccattaaatatttaagtcaaaataaaaccatgaaagttttagccaacgacggaatttcgaaagcaggagaacaggcacttaaagatgccggaatagaagttctggacaacagagttgcacaggatcacgtcatcagtttcatcaacgaaaataacgtggatgttcttttggtaagaagcgctaccaaagtaagacaggatctcattgatgcctgtccaagtcttaaaattatcggaagaggcggaatcgggatggataatatcgacgttgaatacgccattgacaaaggaatctacatcatcaatacgccgactgcatcctctaaatcggttgcagaattggtgtttgcacatttcttttcactggcaagatttctccatgaatccaacaggttaatgcctttggaaggagaaacccacttcaacgccatgaaaaaatccttttcgaaagcatacgaactttcaggaaaaacattgggtgttatcggctttggaagtatcggacaggaagttgtaaaaatgggaatttctctgggaatgaaagtaaaagtacttaccagaaaaccaaaaacaaaagtcctttcgctggaatttttcgacggacagtctgttaatttcgaaattacttccaccaatgatatggatgaattcttaaaagatgcagacttcatcagtctcaatacgccgaaaacaaacgaatatatcatagacacgccacaatttgaaaaaatgaaagacggagtctacattgtaaatactgcaagaggaggtgtaatgaatgaagtttccctgatagacttcatcgaatccggaaaagttgccggagccgcactggatgtttttgaaaaggaacctactccggaagtgcttttgctgatgaatccttcgctttccctttctccgcacgtaggcggaaataccgtggatgcacaggaaaaaatcggactcgagcttgcagaacagattattaagattaaagaaactataaactaaaatatgccaatttttaaaccttttcgtggaataagacctcataaagactatgagagcaccttccctactcatcctctggacaattttacgcaggaagagatcgcggaaaaagctcaggtggaagacacttacattaacatgataaaaccttatgttgtaagtaaatccaaagatatcgacaggaatttaaggaagatccggtcgacttttgaagaattgatggaagagaaaaaactcgttcaggacaattctgcctattatctttatgaacagatttatcccaacaaacaggttttcagagggcttctcggtttagcgagcatcgaagatttctggaacggaaaaatcaagagacacgaaagcaccattccccagaaaaaagaaaaactggctcattatcttgaaaaagtaaatcttcaggcagaacctgtacttcttacctatcctgcaaattcgaaaatcgaactgctgatgaaccatgaggagaaaaacgttccgatcttcaatcatgtggataccaaaggaatccgtcataaaatctggagaatcgataaccgtttaaaattgcagcagtttaaggaagtgatcgatcagatcgattctttttacattgcagacggacaccacagaatcggttctaccgcactgaacgccaaacatcagaaagaaaaaaacaaaagacataacgggacggaacattacaatttcgtgtacagctttatcgtttccaaccagtcgattaaaatccacgattacaacagaatcttaaccgatctcaacggtctttcgaacgaagaatttttaaaggagctggaaaaatatttcctgatccacgaaaaaggagaaacggcatatttcccttcgcagaaattccacatttcgatgtatatggacggtaaattttattcgcttcacgtaaagcacgacctgcgttctcaggagatgtctctggataatctggatcatcatcttttggacaaatacatctttaaagatattttaaaaattgaagatccggacagctcggagaaaatttcttacgtaaaaggaacttccaatattgaggggatcaatcatattaaagaaaaagtagacaacggagaaggaaaagcgggattcggaatctaccctgtaagttttaatgacatgattaaaatttcagacctgaaactcagcatgcctccgaaatgtacattcattgagcctaaattggttactgcgttattaatgtacgatatgaaaccttaatcagttaactttattcaatataattctttcgattaacgctaagattgcaaagaggtatttaaaattttgaaatatattccgttcgcaaaggcacttcgttcagcaaatgacgcctttgctgagttacacgcccttgcgaacggacaattaaagttatacataaaaacatctcgcgttcattgtgtgaaaaataattaactgcgggtttcttaatccgaatttagattatattactattttttccctacttttatctgcggaaaagaaaaggtaaataaaaaatgaaaaaaatattcattatcattccactctttttgggtggatttttattttctcaaaaaaaacctctgaaaaaaccggttaagaaaactgctgtcggcgaaaaattcaattaccacgatgaatttaaaaagatttccgacgaaatcatgaccaacggaacggcgtacgaaaatctgggacagcttaccaaaggaatcgggccgcgtttcagcgcaacgccgggttatatgagagcggtagactgggcagaaaaaaaacttaaagaaatcgggatcgatatgatctggagaatggaagccaaagctccggtctggatcagaggaaaagaatctttacagataaaaaccgccaacggagactggaaaaatatcagaatgctttctttcggaaattctgaaggaacgggcggaaaagatcttaccggagaaattgtactcatcaattctacctcagagcttaacgccatgtcggtgggacaactgaaagataaaatcgtttttgtgaatcttccgatggatccaaagatcatcaataccagcgattcttatttaatcactgcaaaatccaaacttatttccgcttccgtcattgctaaaaccggagctaaagcattaattataagatcattaaccacggcttcagacgatacgccacacgcaaaaatggtgtattacgaaccggatgataaaataagaattcctgctttatccatcggagtaaaatcggctgatgaactggaaaaattattaaaaagccagaaagttactgctaaactgaatatgactgcccaatctaaaggcgacaccacgaatccgaatatcattgctgaaattcagggtaaaaaagattctaaggtaattgttttgggtgcgcagctcgattcctgggatttcggagaaggagcgattgatgacggaaccggagttgcccagtgtattgaagttttaagaacattcaaagctttaggtcttgaaaataaccacacgatacgcgttgttttctacgcgaacagcgaaaacggcggacaggggcgcgaaatgtacgctgcgtatgtgaagaagaaagatgaaaagcacatttttgcactgggaaccgatgcaggaggctattctccgagaggattttctttagatatgtctccgcagagaagaaaacagattttcgaatggaaaaattatttccttccttacggcgtttacgattttgaccagacagaagccattcaggatatttctcctttaaagaaaatggatattcctttggctgagcttgtggtagacacgcaaagatatttcgattatcatcattccgaacaggatacttttgataaggtgaacaaaagagagcttcttctcggtgcggtggcgatgacgcaaatgatttttatgattgataaaaactggtaaatacttttggggaatgaatattttcgacgacttgatatcaagaagtaacctcaatggttttaaaatcataaaaacagattacattccggaaaaacagcagattatacagctcaagataaaacaaaattctgaattgttttttgaggtattagatctgaagaatcgtattataagggaaattttactggatgaaaaaatctgttttacaccgtacagcagaatagagtttcatccggttgatgaagataatttttatctgagtgctggttcttggcatttaaaaataaattctgacggaaaaattgctttgagaaagccaaagcagttcgaaagtgtacacattttaaaaaattatattgttcgggaagatttaaccctcacagacctgaaagattttaaggaatatgatttaacgaaattttttgatgaaaattttgatgaatatgaatttatgtatttttactatgagggaaggtctgaatttttttcttcatccgacagcaatattctcacagtaacgctctattgtaaagaccgtgacgacccaaaatttctgcatgttgttttaaatatacattcgcatgatcatattgatattttatattctgaaaaaatagatcagttgggacatcattacgttatcagtgaaaatctgcaggagcttgcttttgaaaactatttagcggatgataagaatctctgcatccggaaattatccaacgggagctttaaccattctaaaagcattaaaattgaggacttttcggagcttattttttttaatgatgaaaaattcatactgctttttgatgaaaaaattgagatctgggaaagaaatgaaaacggtcttttaaaaagcattccgattgaccgtgaatcttcatataaattggcaaagaatattctcttttatataaaagatacaaagctgaattatattgaattttaagccgaattcaataacctacatttaattaatcattggatatttaaaatgaaaaagatattaggaacaactttaacgcttctgggcttggcggtttttggtcaggcaaaagaagactccatacagtttgcaaaaatttctacggaaatattaaacaaaggaaaagcatacaacgagctgagagaattaaccaaaaatatcggtcatcgtctcagcggttcagcatcctacgaaaaagccgtaatatgggcagaacagaagcttcgtgatgcaggagccgataaagtctggctacaggaagtaatggttctggtgtgggttcgcggaaaagaatctttacacatcaaaacctccaacggaaaatggaaaagcttaaaaatgctttctctgggaaattctgaaggaacaggcggaaaagatgtttcaggagaaattatcatggtaagatccatggaagaatatgataaactttcgccggaacaggtaaaagataaaattgtgttcttcaattatcctttcagccagacgtatatagaaactttcagaggatatggtgatgccgcaaaatacagatcaaccgctgcttcattaacggctaaaaaaggtggaaaatttgcgatcatccgttctctttcctctgcctttgatgatgttccgcatacaggttccatgcgttatcaggatgataaaaaaattcctgctgttgcggttggaagcacaacggcggacgaactggcagaacttttaaaatcacagaaaattaccgctaaactcaactccaactgtggcatgaagggcgaaaaactctcccactctgtgatcggagaaattaccggaaagaaagataaaagcgtaatcgttgtcggcggacatctggattcgtgggacgtgggtgaaggcgcccatgacgacggttccggaatcgtacagagcattgaagttctgagaacttttaaaaatttaggcatccagaataatcacaccatccgcgttgtttgttttgccaatgaagaaaacggtgtaaaaggcggcgttatgtacggtaaaaccgtgaaagaaaacaatgaaaagcatctttttgccatagaaacggatgccggaggatttaccccgagaggaatttcccttgaaatggataacgaaaaaagaaagcagatccagagttgggcagacctgtttttaccttacggagtttatgattttaaaaatacgtattccgggacagatctttatccgcttcacgatttaggaattccgacagcggaactggttcccgattctcaaaggtatttcgacattcatcacactgaggaagatacttttgaaaaggtaaaccggagggaacttctgctcggtgcgagtactctgacgcagattatttatatgattgataagaactggtaaaatatcatacacaaccgctcttcaagggcggtttttttgtttcaaattctgatgaagaggctctttgacaagctcaaagtgacaccgcgaatactaactgtgttatttaaacaatgaaagattgtttttagaaaaacctttaaccctacattgtcatcctgaaaggatctcaacgatacattgaaactttattcagatgctttcagcatgacatactctaaataaatcaccctctaatttttctgaaaatcatgtttgagcagttttatatttatttgtttctcgctaattgagaagattttttaacttaatcatctgctaaatttgcaaaatctgcgggagataataatcattcacgcagcttgtcatcctgaaaagatctgaccaaattataacgattgttcagcgatgaacaagttcttaggaagaagagactcttcggcaggctcagagtgacatctctaatactaactgcaatatttatacaatgaataattgttaaacatttttcatccactgaagcagtttaaaataaattttattccgtatctcaactctcaaaaaattaccctacttttagcctttaaaataataaacatgaagaaactcatttttgcattctgcatgatccttgtatgcagcagccagatcgtaatggcacagtctaaagccaaaacaaaagtacagactacgaattccaaggaatccatgctaaaatcactcaaaaatattatggtgaagggaatggttgcaagcggaaccccaaaagcaaagactgaaaaatttgcagattgctttacaaaagacttaggcgaaaaattaacgcctgaagaacttgcattattttataaacttaatgatgtaaaacccgggcaaaaacctccaaaagagctaattaaaaaagcagaagatatgggcattgacgaaaaaatgcaaaccataggaacgagttgcgcctcacttttgaaatagcttcaaaattgatctgataattcatcaaatctgtttaaacttttattaaccgcaaaagtcacaaaagatctactaaatttttatttaagctgatcattataaatgaaaaagctcaccatagtttttaaaaatctttgatttttattcttttgagcgctttgattattcttgaaattcgctttaacattatcttttgtctcttttgcggttaatactgaaattagtttaaacaagtttatcataaaaaacagacggtacaaatgaatgtatcgtctgtttttatatttctttaagctgatttctacacaaactcattcgtgtcagctttatattttttgttgaacaatcctgcctgttccagctttttcagatgtactttcagaccgttgattcttgtaggatagtgggtgtttcctattgtacacagattctggaatgctttttcgtgactgtcggtatccagcgcataactgattctgtcatacgttcctcttccctgatgtagaatatcgcagatcataaaacacacttttgcaggataaccgttcagattcagccttttgctgtattttttcatattttctttatacagactgatggaatgctctacctgtacccttctgtgtttcgggtcgttggaagcccaatggataaatcttgccgagcagataagttcctgctgttccacttcattggtggtaggattcagatattccatcagcttttgagaactgctgtcgttttcaagctgagaggtggctcctgcatcatttttatagaaaatgcggtcattaatcaggcgaagtctcgggaagtattccaaagcattcggtaaggtaagaagttttctgaaaaatcttacaaaatctccattcggaacgtgtgctgcaaactgcataaaaccgaacgtaaagtaggctctgtcataggtattgaggcagagaaaagagccctgactttccactttcgcggtagcctcgataaagtatgcccaaaaaccgaattcgttcacataatcggcggcattgtacacgagattattagaaaccgaaacattgtaaagtccgaatctctgttcatatttcgtcttgtaagccacgaaaaattccggatctgtaagaccggttacttttgcataatacgcggtttttcctgtggaagtaactgcggaacggattttaaaatcgtaagccatagttaaaagttttaaatttagtgtactgctaaggtaagatttcccttttatttatggaatagctatttcgggtgatttatttacagtatgtcatgctgaaagcatctaaacaaagtttttaatgtatcgttgagattctttcaggatgacaatgtagcgttaaaggttttactaaaaacaatctttcattgtttaaatagtacagttagtattagcggtgtcactctgagactgtcgaagagctcgtttctgaatgttttatttattgatctctgttattttaaatcattgtttagatcctttcaggatgacaagctgtaagattcttatctctcgcagattttgcaaatttagcagatgattaagtagaaaaaatccgcaagatctgcacaatctgcgggagatgattcaaaaagattcttctttccataatgcttcgcaaaatttcaatcagaatgacaagcgaccgttaaagattttggcagacaaaagaattgtaaacaattattaattgttttgtctttcgtttagtattcgagatgtcactctgagcctgccgaagagctcgttcctgaatgttttatttattgatctttgttcttttaagtcattgtttagatcctttcaggatgacaagctgcatgattactatctcccgcagattgtgcaaatttagcagatgattaagtataaaaaatccgcaagatctgcacaatctgcgagaaacaaaaaataaaataattttcagaacaattggagggtgatttatttatggtatgtcatgctgaaggcatctaaacaaagtttttaatgtatcgttgagatcctttcaggatgacaaaaatgctgcaaagacattgaaagagtacaaacaattttacattgaaaaaaaaaatctgcacaatccgcgggagatcattcaaaaagattcttctttccataatgcttcgcaaaatttcaatcagaatgacaagcgaccgttaaagattttggcagataaaaagaattgtaaacaattattaattgttttgtctttcgtttagtattcgcggtgtcactctgagcctgtcgaagagtcttttataaaaaatcagacaatgcctttctggaattcttcttcagaatgaaaagaaaaccattcattactattctaaatcaccattaatttccctgattaaatcttccatttcaactctgaaatcatcctcaaaaaccaatggtctgttgtctgactgaatcatattttttattctttcgcagatgtctatgagttttccgattaaagagttctcttcgggtgatgagattttccccattttcaaaatgttggagaaatagtattgcactccatcgagaacaatacgccgatctttaggatatctcgtctggtaaagcccactttcaaacaattgttgcagtattttataggaatccggtgacagctttctttgatattctaaaattctttcttcttcgttaccttccgaaaggcggatcgcacgttctgcaattttataaacgatgcggtagttttcgattcctttttttctttctacgaacagaattctttcggtattgaaagagggaatttccagaaaatacagttctgcatacacgtctcccatgagtgcattcatgattttcacaaagctgccgagacttctatggctcgaactgcttccgcaaggttcaagatggtttctttctaacatggttttttagattgagcggaaattggggagtgcgtttttcatggttgttttgtgcgaaaataaggttttttgggaaaatgataaatgtattttttaatacctcaaatatatggttcaaaaatttctattattttatttctccagttttgaggtattgcctcccaatttttccaactttctgtttgcttataagcatgaaatggtttttcatatgtagctacatatcctacttcatcttcaacagtattattcattgttataatcttaccattaataccaatagcatctgatatattttgattaaatcttgctgcattagcagttgctagatcattatcatgaaccacaattggattaattcctaaagattttaaatatttaattaaacttatgattgtcgcttttcctcttgcttttacaacttcgaaatcggctaatatttttaaatatttttgcttatctagtcttttcaaactctctttaattagaatatcttcagtatcaccttcaataactattacattcctagtaaaaaaaactcttgaaatataattgtcaatttttaaaatcatttttacatattgcttttcgtcattttgtaatttaataaatgcatcactaacgctaaatgcgtcacagtcaatatgattactaatattagataatctatttaaaacctgtctaggttttcttgatatatctatgagatatggagagtgtgttgacgcaacgatttgtgacaaacccgaacttaattcgtagatcgtatctctcatttgatttgctgcactaggatgtaaatatatctcaggctcttcgaaacatattattattgaacgagaatgttcatcatcctttcttgataaccacatttgtctatatctgagcataccaaaaactgctgctcttatcattccggttccctgatcatcaactgccgttctaatgttacttgacatttctactttgaatgttggctttaaagtggaaggttcacttagatttgtgcttgcatggagtttagaatcaggaaatacattacttaaaacattatttaaatcatccatcattttaccaaattcagaattattatctgaaggatccaattctttcgctaatttttcaagatattctctagcatttttaaaattatccgaattttcacgaacagtttcaaatagttcactcaaagttttatttaatacaccacttccatttccttgtatttcattaactccaacgtctattggaattaacaaaaatctcggtagcattttaaggacattccccggaattcctcctggattttgaaaccatacttcttcttctgaaatttcccaaatttcatctatttcatcaagtttctctttttgttttgaagtcagacttttatctaaatccgaaaagtaactttggataagttcttgactaattccattatctataaaatcttgaggttttttacatccgacaaaatcatttttcatttgtctatcttttgatttaaattcaattacaacatcttttcccaattcataagtctttctataagtaaccgataaaccagtttcatcgatgccattgagaacttcatagttaaatattcttcctttaaatcctctccaattgctagcttctaatggtaaatttctaaactcagcttctaaggtaactatatttgtgtcaacttttatttctccagtttcatcatctaaaattgaataataatcagaagttgttaattgcttcttagcagacaacaaaatatcaattgcctttaatacagagctttttccacaattattctgtccaattaaaaatgtagcgtcaccaaataaaactttaatttctcttaatcttttatatccagaaatttttaaagaatgtaatttcataatcatttttttatatgtaaaaattacaagaaaacattctttacaccttacggaaaaccgtactttcactgaattttcaacaaaaaaaccaccctttcggatggttttcaataaataaaatcaaaaattttaaattttatccaaaatcttctttggcagcacttttaccaactgagatttgtattcattttcgaggattacaaacttccagtattttttgtctttggaaaccgcacaggctttcatattggcgttgatgaggtaagaattttcctttgcagcatactgtacattgtttttcccatatttctgaatcagcatcgcatggattttcttcttcatgtcttcattcagggagccgacattgcatttcagcttgagaaagtaattgacgatggagaaatattctttatcaatctgttccggctttgcaatattcccaaacttaaaatcctgaacttcaatcttcataaacggattgttgtaggtaatgttcagaatctgcgtcatctgatctttcggaatcaccgtgaaaaatttaggataaatgcagttcaccgactgatcgattttctttgttttaatcgtattcacgaaatacgacagtgattgtttaatggctgcttcttccggatttaccttggtctgagcaaaagacatcaacgacaggaatatgaacagaaacaggaatgattgggttttcataattttaaatagacagttgttacgattttcaaagaagacgattgtttcttctttccttaaatctgtcgcagaagtccggcgaatcgttacaaaaaaacagtaacgaaaaaagccatcctttcggacggctttcagaatattgtaagattcagattattttacttttacaagctcaacatcgaagatcaaccatgcgtttggcggaattactcctcctgctcctctttctccgtaacccattgccggcggaatcagtaaagtagcggtttcaccttcttttaacaaaaggattccttcgtcccagcctttaattactcttcccatcccgataggaatttcaatcggctcatttcttttgaaagaagaatcgaattccgatccgtctaccagttttcctgcatagtgtacagaaacgttatccccagctttcggagcttttccttctgttgttttcgtgattttatagtaaagaccggattctgttttctgcattcctgctttcagatcttcaaccattttctcctgattggctttgaattcagcttcctttttagctttttcagcctcttcttttgctaaaaacgctttgttgttttctgcaattttagcttttccttctgtgaaggtttttgctgcatcgtagtttttgtactcgtctcctttgctgaaaacggaaactttttccaaaacgatgtcagttttaggcttatcctgcgctcctttttctacattcgcaatcgcatcgattacatcttctccttttaccactttcccgaaaatcgtgtgtcttccgtctaaccaaggcgtcgcaacttccgtgataaagaactgagaaccattcgtattcggacccgaattcgccatagaaagcaccccttttccggtatgcttaagatcgtttctttcgtcctcgaatttatatcccggatctcccattcctgttccctgaggatctcccccctgaatcatgaaatctttaatcactctgtggaaaatcgttccatcataataaggaacgcctttcgctttcgctttgttatcgatttttccttctgcaagaccaataaaattagccacagttaccggtgcttttttatcctcgaattttacgatcaaattaccttttgtcgtctgaagattcgcataaagtccgtcattaagaccttcgtaagtttctttgtctacgttcatttttttataaattggtgtacaactcatcagcgaaacacttgccgccgccagaattatattcttgttaaacaatttcatggattataatgcttttaattttatgattaatgggatgtcgttatctattttcttctcatctccgtacgttccatacgccagtgcagacggaaccagaagcgtaacttcctcaccgtcgtgtataaaacgcaaagcatcttctaccgccttcagttcatcaaaatgaccgaatttggcatctcttcttgcgattggctgatcgtagattttcgtctgatcaaagtcgtacaggtcataagaataagagatcagcgtattgtcctgccttctctgcctttggtcaaatccttccgtattcgtccagtaattaagctgcgtaggataaaactttaccggctgattgccaatccattcctgaatatggtatctttcctgtgcattcagatttttcatcctgtttttggaaacatcaagatcgttcttgctgagaacaccgccaacgggaggatgagtctgcgcatttttgctgcagctcagtaaacccagtatcgatatgaagagtatttttttcataaacttttgcgaaaatacacatttcgggaatcaattacaaaacttcaggaacttattgaattaaaaattgtgacaatttccctgtcttcctgagtgtaaaacagtcgaaggattatgatgtaaatttccactgcttttgaaaggaattgtatttttttggagctttatcgcgctttccgcactcgctatttctttagtttccggcgcggcttcgccgcgccggaaactaaaaaaatgagctcagacaattgctccaatcccggctaagattgcagacattccttacaataggcaaacaagtacagcttgttattttattaaaaactttaacgagtcatgtcattctgattgaaattttgcgaagcaatatggaatgaagatacattgaaaactttcttagatgttttcagcatgacaaacatactgtaaataatttagcagattacgcggatttttctgcttaatcatctgctaaatttgcaaaatctgcgagagataataatcatgcagtttgtcatcctgaaaggatctaaacacaggactttaaagaacagcaatctataaataaaaggctcgaaaaaagctcttcgacaggctcagagtgacaccgcgaacactaaatgaaaaaatgaagcaatgaataattgtcaacaattctttttatctcccaaaatctttaacaatcccatgtcattctgaatgaaattttgcgaagcaatatggaatgaagaatcttttgaattatctcccgcagattgtgcagattacgcagattttttttcaatataaaattgtttatccttttttaaatgttttaactgcgtttttgtcatcctgaaaggcttcaacgatacattgagatctttccttagatgctttcagcatgacaaacatactgtaaataatttagcagattacgcggatttttttcaacgtaaaattgtttatactttctcaatccattgacagcgttttagtcatcctgaaaaggatttcaacgatacattgaaaactttcttagatgctttcagcatgaaaaacatactgtaaataatttagcagattgtgcggatttttctacttaatcatttgctaaatctgcgatagataatcatcatcatgcagcttgtcatcctgaaaggatctaagcaaagtataatatatgaattttaaaaacagcgataaataagacatccagaataaaaaactctgtggagttttatctgtgtagaaatcatatttaggcttacgttcggcgttccgtagaacgctatctttagaaaattaattgaaaattatagatatcaatcctatggattgattgatggacttattcttatttctacacagattctgctcctaaaggagcaaccatcttcacttcaaactacttaactgataaaaatttaaaacaaaaagccggaaaaaatttccggctttacaatatctaacgtttaaaaaaattaaactgtttccaatacgtggtctactaaaactctccatccgaaaggatcgtctgaaaggtttgtctgaagattcacaagatcgtttttcaaagtaactgcgaagctttcttcgtctgataatcttggcaattcaagcttttctcctttgtaacctaatgcctggaaaacggtagtaaccaccgctgttcctactccccaaacttcttttaaagttccgtttttctgagcttctataacgtccagcactttaataggttctacttttacttcaattcctctctttttagccaattggatgaagctgtctctggtaactccgtcaaggattttttcggaagtcggaggtgtataaatggtatcgttgattcttacaaaaacgttcatcgttccgctctcttcgaaatattcgtgagtagcatcatccgtccagataatttgctcatatccttcttcaattgccaactgtgtcgggtagaaagaagccgcatagtttccggcagctttcgcagaacctactccaccgcttgccgctcttgaataatggtctgaaatttttacagaaacaggttctgtataatacatctttgcaggagttgcaacgatcgcgaacatatatttattggcaactctcgccttcaatgcttcttcagtagcgaaaatcaatggtctgatgtacaaagacataccttcaccggaagggatccattctctgtcgatatcaaccaatgctttcagtccgtccaaaaacatttcttccgttatttccggcatggcaagacgttttgccgacttattgatacgttcaaaattcttttcgggcctgaaaaggaaaacctgtccgtctttgtctttataggctttcatgccttcaaaacaagcctgtccataatttacacccatcattgccggtgtaaatgccaaaggaccataaggaaccaattttacatcaccccattttccgttttcgtactcacagatgatcatatgatcgataaaagtatttccgaatgaaaaattgtttgggtcgaatgtagaaattcttgagttttcagttttttgaattatcatttctaaaattttttatgaggttctacaaatttaacataattttctaaatataaaaattttagagtaaatttgtaaaaaaatagcttgaaaagagaaattaagaccacaaacgacggcagcaaaacactgtttatcaattatttaaatgaaaactatcattcacaccatggtgcattacaggaagccgaacacgtgtttatcaaaaatggattaaattcgataaatgattacgaaattaatattttagaactcggttttggaacaggtttgaatgttttggtaacaattaatgaatatttaaaaactgacaaaaatcatatcatcaactattttacccttgaaaaataccccataaatgaatcggaaattaacgatttagcctattttgagcttttcgataacccggaattcagaaatatttatcaaaaaattcatctggcagaatgggaaaaatcagaagaaatcattagtggtttcaacttaaaaaagatagaatgtgatttttttgatctgaaaaacatcgatttaccagcaataaatctggtatatttcgattgtttcggtgcaagagtacagcccgatctttgggaaaagcccctttttgaaatggtttcggataaaatggctgttaacggattattaacaacctactcttcgaaaggaagcgtgagaagaattcttcaggaactgaattttaacgttgaaaaaaagcagggacctccgggaaaaagagagatgattaatgcggtgaagttgtaaggaaggaagatggaagcttgaggctggaagatggaggttttactactggatgttttatgatctgtaaaattttgaagttataccttattatatattgaagttttttttaatttcattctaaaagttattgattgtccgtttattaacctaaagcttcgacaggctcagcttgacatcgctagaaattaagcgtttagtattagaggtgtcacactgagcttgccgaagtgtctgttataaataattgattttcatatcagtgcatagtaataggttgtttaacggatattcaattaaaagtttgtcattccggaggaatctaaacatctcattcgacaaaagactggaaaaatttgcatcctgatgcttttgagtatatcaaatctaaggtttaaaaaaaattaaaatcagtcgtaaacttccagatcatgtcttcgggcgtccgacaaattttccctaaattagctttaacaaattattatatatgatagataagatcaacattagagtttacgcctgtgcggtaaaagataaaaaagtccttactttatttgaagaatacgcaggcgaacctttaatgaaatttccgggtggcggactggagtttggagaaggattaatagattgtcttcatcgtgaattcgatgaagaactgaatgtgaaaatagaagttgtagaacatttttatacgcaggaagattttctggtttcgcgtttcagagaaaatgaacagcttcttaccatatattatattgtaaacattattgacgaaggcgatttcctgattcttgatccctgcatcgaaaaaacagaatggattgagatcgaaagaccggacaatccgtttccgttgcccatcgacaagattgtttttgataaattaaaagaaaaattcctgtaagatcgttacaggaattttttatgattgctattatttgtagactttaaagctgctcgctccggaataaggctgaagataaccagaattccaattagattgaagcagggattccagatattcgtcggttctgtttttgtgcggatcgtaaggatctttaagatcaatatctgccatttttccttttacattccaccagaatgcgctccatcctcctcttaattctttaatgatttcatagacattttttccggttgctctgttcatcagtttggcaaagacctgtccttctgttgtcgtaagatctctgagctgtttttcatactggtcggctagaatattctgtcggtctcttatgtattttcgttttgccttactgtccatattcgtcatttctccctgaatatctctgtattgctgtaaagcagttaaaaataacggatatactctgtaaagctttttatttaagaaataataatagttcctatccagctgattattgaatttcggtttattcagcaaaaccagctcatccattaccacgacggtctctccgttgatttcatagattcttgctttctgcctttcatcatagaaatatttattgccgaattcgtctgttttcaaaagttctgcagggtactgacttaaaggtttcgcaatgatggaatccctctgagccgaaatactgactccaaaaaagaagagaaaaagacaaacaatcttactaaaattcattatttttacgcgtattagaacaaaaattgaacgcaaaaatcattcctttttatgaaatttgaaaagaaatctttaaaatttttagagaaatatttaaacacttcatctccaacaggatacgaacatgagggacagaaagtatggatggactacattaagccttatgtagacaaaattgaagtggatcattacggaacctgctacggaatcattaatcctgaagcggaatttaaagtggtgattgaagcacatgcagatgaaatttcttggtatgtaaattatattacagacgatggattgatctacgtgatccgaaacggaggttctgatcagacaattgctccgtccaaagtggttcatatccacagtgaaaacggaattgtaaaaggcgttttcggatggcctgcaatccacaccagagctaaccagaatgaacccactccgaaaattgaaaatatcttcatcgattgcggggcaacttccaaaaaagaagtggaagaaatgggaatttatgtaggatgcatgattacctatcccgatgaattcttcgaaatgaatgaccgctattttgtctgcagagctttagacaacagaatcggaggttttatgatcgctgaagtggcaagacttttaaaggaaaacaaaaaaacaattccgttcggattgtacattaccaattccgttcaggaagaagtaggtttgtatggagcagatatgattgcagatactatcaaacctaatattgcgatcgtgacagacgttacccacgatactaccactccgatgatcgaaaagaaaaaagaaggtgaccagaaatgcggagacggaccggtggttttcttcgcaccaagcattcatcacaccatcagagaattgattatcgacaccgcaaaaacgaagaaaattcctttccagagagcagcagcgagccgcgctacgggaacagacacagatgctttcgcgcattctaatggcggcgttccgagtgcattaatttctttacctttgcgttatatgcataccacagtggaaatggtttccaaagaagacgtaggaaatgtaatcaaactgatctacgaaacacttctgagaattcagccggaaatgaaactgaagtatcattaacagaagtaaaaagagacaagttaaaagtaaaaagtaaaaatgaaaacgaagcttattgctccatcccttttatccgcagacttcgggaatctgcaaagagacatcgaaatgctgaataattctcaggcagactggtttcacgtagacgtaatggacggaagatttgttccgaatatttcgttcggatttccggtaatgaaaaccgttcagcagcacgctaaaaaatttgtagatgtgcatctgatgattgtagagcctgaaaaatatgtggaagaattcatcaatcacggagcagatcttgtatctgtgcattacgaagcgtgtactcaccttcacagaaccattcatcatattcagagtctaggtgcaaaagccggtgttgttttaaatccttccactccggttctgatgctggaagatattattgcagacgtagatcttgttttgctgatgagtgtaaatccgggattcggtggacagaaattcatcgaaaatacttacaagaaaattgctgaaacaaaagacctgatcttaagcaacaattcgacagcattaattgaaattgacggtggtgtaaatatcgacaacgcctctaaacttttcgaagccggagccgatgttctggttgcaggaaatgcagttttctcagcagaaaatccggaaagaacgatcgaattactgaaaatttaatttcatttaaatacaaacaaaaaggcaactccgttgagttgcctttcttcttaatgaaaatctgagcctttaatggttattagttttgaagagtttaatgcttaaattttccttctctaatgctgatgtaaagatggcaataaatgaggacaaaaacatccgtaaaaacacggaattttaatctcggtatttctacttaaccccgaagaacagcaaggtttaaatcattcaataacaaatacaggagctctataaagttctttttaagtatttttagatcacaaaaataaaaaatgaaagggaaactaatcggcatattgtctttaggtctggttttattttcaggaaaatatcctgcgcagaatcagcctcaggaaaatcaaaaaatggaatggtttcaggatgccaaactcggaatttttattcattggggaatttattctgtgaacggaattccggaatcatgggcttttttcaataattacatcagccatgaaaattacatgaaacagctcaatggtttttcggctgcaaaatacaaacctgatgaatgggtaaaactgattaaagattccggcgcaaaatacgccgtgattactacaaaacatcatgatggtgttgcactttgggattcaaaagctgaaaaatcaaccaccattcctaaaaattccttagccaaaaaagatgtgctttctccgtttatctctgcattaaaaaattccggactgaaaaccggactttactattcccttcccgactggagccatccttattacgacatcaatacccggacaaaaaaacgttacaaaattaaaaatgatccgaaacgctgggaaaatttcgtcacctattatcagaatcaattaaatgaactttcactacaatttaagcccgatcttttgtggtttgatggcgattgggaacactcatcagaagaatggcgcgctccgaaaactctggaaaatttaaaaaaattcaatccggacattatcgttaattccagactgaaaaatcatggagactacgaaactccggaacagggaattcctgtggtaaagcctcaaagcaattactgggaactttgctacaccatgaatgattcatggggattccagcccttcgacaatcattataaaactccgaatatgatcgtaagaactttggcggacgtgattaatatgggtggaaatctactgttggatatcgctccgaaagaagacggaaccattccaaaacagcaggttgaaattttaaaaaacttagcaagatggacaacaaaaaactccgaagccatttacggaacaacacaaggtttgccattcgacaattataaaggaaaatctgcattttcaaaagaccggaaaaaaatatttctctatcttgaagaagccaaagactttgtaaaaatatacggtttaatgaccaatattatttctgccagaattcttggggacgataaagcgaagattgatattaaaagtaacggtaatggagatttcactttcaatttttcccatgtaaaatttgatcaggacgtaaccgttgttgaaatatcaattgacgaacctatgatcagagtacaaaatgataagtccaatttatatcttcatgaagctttagaaaataaaaatacgaaaccggcagtctatgaaattgcagaacagcttcattcgggaaataacatcttcagaaattcgggtttaacagaggacggaatggaaatgaaacttcccaaaaccgataaaaccaatcccgaaattctaaactggatcagcaaacacgcagaagcactctatgaaaaagaaaagggacttccagaaggtcatttttcaggaaactccgtactttccaaagacagacagaccctttatctttttgtggaaggaattccgaccggaccgatcgctttaaaaggtattaaaaacgaaattgcccgaatccgtatcgtgggtgaaggaactttattaagccatgaaatatacaataagctttactggagtgaggttccgggaattatttatattgacgtacccaaagagaaactggataaaaatctaactgttattaccgttcttcttgataaaccgctcgaattataccgtgaaaaagttggcgcaattgaaagcaatctgtaaaaaaaaacaaaatccgaagaagtttctccggattttttattttgaaatgatttttcttagaaaatttctcttcctgaaaaatggaattttgcttcgataagagcgttttcgtcagagtcagaaccgtgaacagcattttctccgatgcttcttgcaaacatttttctgattgttccttctgcagcttccgcaggattagtagaaccgattaaagttctgaaatcttctaccgcattgtctttttcaagaacagcagcaacgataggtccagaactcatgaaatctaccaattctccgtagaatggtctttcagcgtgaacttcatagaatttttttgcatcagcaacagtaagttgagtcaatttcatagctttgattttgaaaccaccttctgcgatctttcctaatatagcaccgatatgtccgtctgcaactgcatcaggcttaatcatagtgaatgtaatgttagacataaatgtatatttttttaatggcgcaaaaatacaaaaaattcttttgattttaattttaaaatatttttaacataaaaataacatttgttaaggttttatgaacaaaactttggcacagtaattgtttgttttattatgattctcatgtttaatttgagttttcatggttattagtttttacccagcttcggctgggttttttattgcccgtaattccccaaaaactacgcctaacttcaagatttttaaataattaaacccatgtttaagtttttacaggctgaatattaaggtttattcatcttaaatccagatttaatattgaattaaaatgacaagaaactttttaccaaagcaagaatttttggcataaaaaattattcatcaaaaccatataatgatgaagaaatgatcgtaaaaggttaaaactatttttgggaagcttcttccgcctcttccattagtttaatataggtagaatatcttgaatgctgaatttctccggtttccagaccatcgattaccgcgcatttcggttcattgatatgaagacagttgtggtatttgcattcttctctttttttgaaaatctccggaaaataatgctgaacttcttctttttcgatgtcgatcatggcaaattcacgaactccgggtgtatcgattacgttaccgccaaaatcccagaaatgcatctgtgcaaaagttgtggtgtgtttaccttttaaatgcgtatcggaaatttcagaagttttcaggttaagtcccggctgcaaagcattcaccaaagtagactttccacaacctgaatgcccgaagaaaacagatgttttatctttcagcaattcctgaagctgttccagatttaattttgaataggaagaaatttccagagcatcatagccgatttcattgtaaagaaattcaatatcttttacgatctcaatttcttcttcatgcagaacatcaattttattgaataaaattaagggagtaatattgtaggcttcgcaacacgccagaaaacggtctaaaaatccaagggaagtttcaggatgttttaatgtgaaaatgaaacaggcaagatcgatatttgaagcgatgatgtgtgcttctttcgaaaggtttacagattttcggatgagataattcctgcggggctcgatctttgtaatccatgcgatatcatcctgttccagttgaaattctacaaaatctccaacagcaagcggattggtaagccttgttttaatcaatttaaattttccgcgaattcttgcttcgaagattttcccggtttccatttccaaaacctgataccagcttcctgtagatttaatgatttttcctttcatactgtaagatgctgcaaatataggaaatttagtttgagtgtttttaaagttttagagccggagagcttttataaaagtcatccaattactttttcactctccaactctaaaactctcctactccaaaactctcccactctaaaactctctcactctaaaaccagattatctgttaatcataatactgttctgaacctcgatagactcttcgtggatcgctttgaatactttttctatgaattctttcgtcattccggtctcaacagctttttgagttgcgtattctgtaatttctttccaacgctccggctggaaaatcgcaatatcattctcttttttaagctttccgattttttcagaaattttcattctctgcgcaagcatttcaatcagttgaaaatctatatcagaaattaacgttctgtgtcttcccatttctccttcaaatcctgccaatcctgaatttctcacctttaagttcccgattaattctgccagaacctccggtgtaatctgttgtgcagcatcactccatgctgcatccggattgctgtgtgtttctataattgctccctggtaacctacgtttaaagcttcctgggtaatgtccgccaaaccagttctgtttccgcagatgtgtgaagggtcgatcagcatcgggatattcgggaactggcttttaaaatctaaggcaatttgccagtttggattgtttctgtattttgttttctggtatgtagaaaaccctctgtgaataactcccaagttggtaattccctgacctaaaagtctttccaaagctccgatccacaacgcaagatccggatttacaggatttttcactaacacggttttgtctgttcctctcaatgcctgtgcaatttcctgaacggtaaaaggatttaccgtagaacgcgccccgatccaaagaatgtctacatctgcttccaaagctgcgaaaacgtggtgtgcattggcaacttccgtcgctgttttgaaaccgtattcttccttcacttttttcagccagttcagaccgattactcctactccttcaaatccgttcggttttgtacgcggcttccagattcctgcacggaaaaccggaacattggcattggtttccctaattctttttgcaatttccagcatttgtgcttcactttctgcactgcatggtcctgcaatcatcatgggctgctggaattcattaatccattcgttttttaagtcttttaaattcatatttttaattttactattatcgttattggttcatattcaaacacaaaaaagcattataaaattactttataattctttctaaaaaatgccgttaaaattttttaaaggaatcaggaaataagaagaaatctataattcctgtagatttttttgaaagaaatttatactagcagtaccaataataaaatcgataatacgttctgaaatttctaaaatacggaaaagaaaagccaaattgcccgctaaaaaattcagcaggagcaaatacagattgatatgactttattaatttttccaaaatagatgttctatttctagattttcggtttacattttaactgaaaaagctgcgttttgtttttcaattatctgacaaatatataaattttatttaaaaaagagtttcatgtaccctatttttttaaaataaaaattgtgaaactttttcttaaagatttttctgcagtaaaaattattaaggaataataattatgttaaatcgaatttcatcagatcatcaagatctttcagcaaaggatttaatttaacaaacttttcgaacttctttcttggagtcattacttctactttcagattttcggcatctcttttatatgcaacctgaatggaatgattgtgaactttcgttttaaaatgattaaaaaattcacggcttactttatcaaattcagcttttgcagaatccgaaggaaacagaacggtaatttcattttctccggattttaccattttgaaagatttaatggcattgaaaataatggcatcttttctctggagctgcttgagaagtaaattccactctgcctgaagatctgtttcggtaaagtgattttggggaagctgttctgttttggctacaactttttcttctacaacagttgtttcttctttgtttaaaaaagaactgatgctgaaccctgaagaaattccgggtctcgataaaggtttcgaggtttttttgatctccgcaacaatgggaagttccggactttcagagggttgctcctgtttaggtttctgttcctgagtttccgtaggttttacggggatttttacttcctgcttctcactgagaaacggagccagaattataaacttttttttttagcaacgtctgaattagccgtcaaagaagccaattgcattagagcaatttctaccgtaagtcttggattcttggaatttttataattgatgtctgcatgattgcaaatctcaatagcatcgataagctgttgcggattccatttctgagcctgttctacaaactttgtcttggtctgctctcctacttctatcagatcaatggttgaagtattctgcgccatcatcagatctctgaaatgacttcccaatcctgcaataaaaatatgaggatcaaatccttttttcacaatttcattgaaagcggaaagaacttcgggaattttattttctttggctaaatctacaatttttaagtactggtcgtaatccagaatatttaaaacttctgcggcttttgcgagtgtaatattcttttgggaaaacgtggaaagcctgtcgaagatggaaagtgcatctcttaaagcgccgtctgctttctgggcaataaggtataaagcatcatcttcatactgaatattctctttctgagcgatatttctaagatgtccctgaatgtcttcaattacgattcttttgaaatcatagatctgacagcgggataaaatggtaggaataattttatgcttttcggtagtcgctaagataaaaatcgcatgagcaggcggttcctcaagtgttttaaggaaagcattgaaggctgcagaagacaacatatgaacctcgtcgataatatacactttatatttaccaacctgaggcgcaaaacgtacctgatcgatcaattctctgatatcatctacagagttgttcgatgcggcatccagctcataaatattgtaggcaaaaccgtcttccgaaactgatccgtccttttcattgatcttccttgccaaaattctggcacaagtggttttccctactcctctcggaccacagaacagcagtgcctgagccaattgattttcttcaatagcgtgttctaaagtatccgtaatatgagactgcccaacaacagtatcaaactgctgcgggcgatattttcgtgcagatacgataaaattttccattggtcaaaaataagaaatattgttgtaatttaaaaatgaaatccttttaaattacttttaaaataactctgttctgacaatagtaaacttttctcatattatctttcttcgtaagcaaaatcgatgatttcggtaatcgccttttctatttcttttcttccttcatcacttttcaggtctattccgcagaatatgcttgcattgtgagctgtgtaaaggttaagataataagctccggaaaccagaagtgctgcaatggcacgataccttgtagatttatccttaaaatgcggatctacaatattcgtgaaaagcatttctcccatttcttctctctcatcggctacttttttcagaatcggtttgctttctgataatccccaaagaataatcttctgaagttctttgtttttcttgatgtgctcaaactggttaagaatggcaactttagaaagctctttacctccgtctgaaaaatccacatggatattatcctggttcattttgctccagtaatcctgagacctgatgtattcgtcgataagcttttcggtgcttccgaaatattcgtaaattaattttttatcaaagcctgccactgctgctattttactcactttcaatcctgagtaccccttggttctaaggatttttccaacagcagcaagcaatttttgttttgttttttctttgtcccgtatagggccttgtacaacttttcttggcatttgttatttatttttttgcaatatgcaactttttattgatatcctcaaatgcattgagggttttatcaagatgttctttatcatgtgttgcggtaacactcatcctgattcgggcatcctttctggctacagccggataaataatggggtttgtatatactccgtgttccagtagcattcttcctacatcgcccgttatatgcggatctccgatctttacgggaacaactgcggaacaagtagtcccggtatccagccccagatcattcagtccttttttaaagtaattgatgttttcccagagtttttctctccattgtggttcttcatctatcagttcaatggcttttataattcctgtagccgtggaaggaggcgttgttgctgaaaatatctgctgtctggactggaatcttataaaattggtaaggcttttattggcgattacatatcctccaaggttaccgaatgttttactgaaagttcccgtaataatatctattttatccagcaatcctgtatcttcaattgtccctcttcctgttttccctaaaatacctactccatgaacatcatcaaccatgagataggcgttatatttttttactaatttataaatttcttcaataggagccgtatctccatcctgagaatagacaccgtctattaccacaagctttgtacggaactgcttttccgatgttttcaaaatctgttccaaagcctccagattgttgtgcggaaatgtttttctgttggtaagaatacatccttcatatacacttgcatgtactgccatgtctacaattgcgatgtcttctttctgcaacaggatctgcaatgtcgcactgtttgttgtatatcctgttgtaaaaatcacagcttcatcctgagaacgcccgaaaaaggaagcaattttagcttctaaatcgttgtggtaagaataatatcctccgataagtggtgttgccgccgttccggttccgtatttctctactccttcaattgctgcctgctttactttcgggtgttgtgtaaaccctaaataatcacttgtaacaaagcttacaaattctctggttacgttgtgagttcccacattcattacagaactgcaacctgtattattctgcaatctgtagtgatgacgtccgtttgatttcatgtattccagaaagtcataataaatgtctgcacgctccatcatatcgaagccgggaatattttcgaaatccttgaaagttgctgttgaaaagttaatgtccatccttaatttttgttagctgtttaatgttaaaacaaatatagtattattttaaaaatatataaatttattttctattaaaatttattatgcataaaatatttatattaaataatcttaaaaaacctttatatctttaaaataatttaaatattaacaaaaaaagaataaaacaaaaatttcctcaatcgcttaaaaattaagcaattaataggatatgtgtttggtaatgatttggtagagaaaatttacaacttttgctgcaaaatatcattgaaaatcagaaataaaaaaaaggctgaaatctatttttttgggaacttcagaatcagcctttcttaacatttgtccttttagaatgtaccgtccacattttttaaagccaaatcatttaattcagtctttaaaaagtcccgttaagagaaaaatttcaacatttcaattaaaatcacccttaatggaattatagcaaatataaatatttttttaacataatttaagatttttaaatattattttaagaaaaataatttaaacataccacaataatatcaatcataaataataaactcaacaaaatatcacacatattcagtgttttgttacaaattttcaatacatttaacaaaatgataaaaattggttggatatttgaagtgtaaaaataacagctactcttatcgttcaatcactcacttaaagtaattattatgatcattcaatattcttttcttacagactatatcatcggtatgatgagaaagtcttttaccatacccgtcaattgatctgcaattatcatcaggtgttctgaaactattttcaattaaaaaaacttccactatcatgatttttgaagaaaaccattctgtattgcaggatagccacaatctttcctatgtaaaaaatgtgatcaattttcacggagataaatcttttattcttaattctttgcagaagattaaaaacaatacgatttgcaaaataaaaagaaaaaccattaataagctgattaaagaatacacgcatcatcttaatcaatatattgagaatgacgatattaattcaaaaccggagaattacgagctttcgcctgtgtacgcaagacagtcgtatgaaaaagtattaaaagaagatgaatacctgcagaaagttttaacttttttagtgaatcagtgagagtctctcttcttccagatcaattttcacaagatgtcttcggatcaggtcttcgtcaaaatgctgctttttgtcatagttttgttcaattagccatgctctttgcgcattgagaatatcaagataagcctctttaatttcggaggatagtttaatatcggagtctttttccacttttcctttccatttttcatggatctgctgcaaaaagatacttttttccagtaatccgctgtgattttttttgagatgctctaaagtcatttttgccatttcccgacggataagctcttccgcttcatcttcaggcaaatgatcgttgtaggaagggatttccatttttctgatgagatatggaagcgtgagtccctgaaccagcaatgtcgttaaaatcacaataaacgtgatgaataaaattaaattccgctgaggaaaatccggaccatcgggatagagttttacgggaattgaaagtgctgctgccaaagacactacccccctcattccggtccaacccaacagaatcggagctttaaatccgggacttctgttgtctgcaaccgtgatgaagtttcgggcaattagagtaaccactaccgctccgtaagccgacagaattcttaccacgattaaaacagccgttacaagcaaaccatatcctaccgcagcgtaaatacttacttctcccaaacctgaagtaatttccggaagatccagaccaataagaataaaaaccagaccattaagtacgaaagaaaggctttcccagacattcagtccgcgcaaacgtgatgaagtactgagaaaattatggcggttattggaaagcagcaatcctccgcttaccacagccaaaactcctgaactgtgcgcttcttctgccgcaatatacattaaatagggtgctacaatggtaagaatggtatccatattggcatctgtgggaaggattttctgccctttcatgaacagccatccaatgattaacccgattccgattccgccaatcagcatccatgaaaagctgaaaaccgcatcctgccaaatgaactgtccggttgcaaccgcaatcatcgcaaaacggaatatgattaaggaagacgcgtcattcagcagactttctccttccagaatagaagacagtcttttctgaacttttacaaatttaagaatcgctcctgcgcttaccgcatcgggcggcgagacaattcctcctaaaagaaatcctaaagcaagagaaaatcccggaataaaatgattggctacaaaagcaaccgttgttgccgtaagaaatacaacaacaaaggcaaaacttcctataatccgcctccatttccagagttctttccaggaaattgcccatgctgcttcatacagcaaaggcggaagaaagataataaagataagttcgggatctattctgatgaccggaacgttgggaataaaactgattaacaatcctgccacaaccagcaatacaggataggcaacccttattttgttggcgatcatgatgataaagacaatggcaagaatcagtgagagataaaaaggaaagttttcgatcatttttaattttttctgaattaaagatacgtattaaagtgaaaaactgccgtaaaaatttaaccggaaaatgttgagttaatttaaaaattcaatagaaaatcaattaaaaaaagacattttaagaatttaaaaaatttcatcaaattagcggatgaaaataactccataattttttgcttgattttttaagcacatcatgaatatttcagaaaaagcagacaggaaaagcagacggttttactacatcaaactgtgtatatttttatcgggactttcggtatttgcgcagctttatctttttcagccgttattgccaatggttgcggaacatttccatacgacggttggagacagctctctgttggtttcttcctccacaatcgggatggctttgggacttttcttttttgcatttcgcgcagacagcttttcgagaaagaaactgatggttttttctttgattgcttcggcagttttaacgatcatttccgcatggattccgagtttgatgcttcttattattattggaatggtaaaaggttttgtcatttccggtgtttcttcagtagctctggcttatcttacagaggaagttgaaatttctgtcgtagctttggcaatcagtatatatctcagcggcaatacgattggaggaatgagcggaaggattttggcaactcttcttgccggagaattgggatggagaaatgctgttttgatgatcggacttcaaagtctgattttgggactggtattttggaagctttttccggattcaaaattttttaagcctcagaaaacagattatcacctgaaaatgaagcagatgaaaagactgatccgtgattcttatatgttgcgtttgtatttcattgccgctttattaatgggaacttttgtaagcgtctataattatatgacgttccgtttagaatctgaaccattttctttaaaccatgtttttattgcgtttatttttctgatgtacactttcggggttttgggaaccatgataaccagcagattatctgcaagatttgaaaagaaatacattctgaagggttcgattttctttttattagcgggacttgtgcttcttctttctgaaaacatttatatcgttgttttcggactgggattgtttacactatgtttttttgcggctcatactatggcaagccagatgaccgcgttgcatgctaaagaaggaaaatcttcagcaacttctatttattggcttttctattatttcggatccagttttttaggaagcggaaccggatatctgctccactctacctcatggaacgtctttattggtgtattaatctcagtcattatgattgcatttctgctaacgatcgaaaataaatctctgaaaactgaataattaaatttttaaacttaacataatataccacacaaataccacaaatttaactttcctaaatattgtttaaaatttttaatttattttaaacaaatgatttacaattatttagaataaaaatgaaaatcattcttaacaatagtttaattattattccaaacataaggcatagtatttgcaaaacttcttacacaaggcattcactaaccttagaataataacataaacacccacaaaatattatgaacgttgcagatttaaaaattaaaaatctagtggaatataaaaatcagatctatacgattactgaaatattccagaatgatgaaaaagattattttgtacagattgaaaatgattttcacagtttttctgttccggcaaaatcaatcaaacccattcagataactgaagaatggctggaaaaattcggattttcaagaacttacagctctgaacagtgtattcgttacgaaagaccggaaaccttcattaaatatgattttgatctgagttccagaaaaattgtagaaggactaaaaatctacggaaattctatcaaatgtaagtacatccatgaatttcagaacattttctcctgcctgtttggaaaagaacccacttccataagttatggactgatgcacaccgaatcttaataatatatactttcatttaaaaaccacaactttcgggttgtggttttgctttttattcctcttccaatacttcttccaaagttacaggatctacttcttcctgatattgctcccattctttttcgagctgcttattggttttcatttcctcttcaagcttcagtgtttcgcgatattgtctggcttctgcggtaagcgtccatttgcagataattccggtatcttccagataatttttaatgtcgttaattccgagtctgaaaaattctttccgcggattgattttattaagctggttctttaaaaactttttgtgaagctgtctttccaaagccggagcatcatcagaataaatcatggcgtgaacatcaaattcaaacggaacacttgcatctccaagctcacgaacacgatccagcggttccagacgtcttgtcattccgattttgtaaacatcctctccaaatgatccaacatttgaaataatataaacatttccggagcgcgtttgctgcgccatcgaaattgctctttgatttttttcttccgcaaccattaatttaccctgaagttcttcaagtttctgctggtacatcattctttgctcttcattggcttttgcaacctgagattctgctttttcaatcagtcttttcaacgttaattcttctttttcagcatcttttatggctttttcatactctcttcttgctttttcttcttcccgcatctgttccctgatctgcctttgctcttcctgttcctgccatttaagttcctgagcaataaccgcccatttcagttcctcaagacgggcttcatgatattccaccgaaattctggcttttctgaatgcttctccgttgaaattaaccaactgaaaagcatcgtctattttctgtttaagaattccgtaattgtctttttttactgaatttaaaatggtttcaacttttccgttataagcatcaataacaaaatctatggcaatatttcttctgaattcatccatatattcgcagattccggcttgtcggcttgtaatcatcagtcgattattctgacgaagctttttaagattttctccggcttctttgtggctgaattcttcagcaagatcatccagcaaagtgtaagaaggtacaatatattcgtttccgtagccttttatcacatttttcattgcttttattctctcggcaatttcattcgcttcacgcaaacttctgtaagcatctcctccaatggcaagtgctttatcttcagcagtatcgataattcttttggattctcttactgcattttcatacaataattcaacttctctggttcttttttcaacaagttccttcgtcattcttttcgattctttcgcctgaagctgcgcgttatccagctcagcctgtgctctttcctttaattttaaactgtctctttctgctcttttaaggagatactcgcattctacctgaacattaatgatatcctgatatttgcttaaagcatcattttgatttctcaattgattattcttttcgtccaccgaacgtttctcgatctgcagattagaaaaatcggctcttaatctctggattttgtcctgcaaagatcttttgtctgaattgaggtttgaaatctcggctctgagctgattgatttccttgttgagatttgcaatctgagcttctttctcagaaacctgttttttatttttacctgatttactgaatgcaataatcagcagaaccgataaaataataatgattaaaatttccatataattaaagtctttttttaatgatgagatgaggcaataatacaattttagaacatctgctgattatggttttccataagttcataaaaaaattcggcttcaaatcgaagatttgaagccgaaacacaccttctaaaaaaatattatgcctccgcatattcccatattccggaaacagaaagtatttccagtcccggttgtttttcgccataactgaaaattccgatgtattttgtagcgcaggattcgcagtctgtcccgaaatacaacgtcggtaaatcattaaatgtaaattctccgacatgaagcatattcttttgtgtttcttttaccattgaattcttaagtaaatcactgatagatagaattttattttcatgataaagttgaaaaataggaaaaccagattcgtaaggagtaatgttcaccagattttcatgagtacagttgcagcagatgaatttcagctccgcagacggactgatttcatcattaataaacgtatctttcggaataattgccttatttacaatctgtattttctttgttattgcgtacattttaagttaaatttattgaatcaccattccaaccgctgaaggataatttccgctcggacttttctttatcgttatcttaatataaccttcctgagcaagcttattccatgtttttgtatatccggttgaaggatccagaggaattttccacatcgtctgtttcccttttccaacctgcccgaaccacggaataatgtctgccgattgtcccttgaaaggtagcaaattattcaaaacttctatttcataataaaaatcataagcattttccggtttgttaagggcgcgttgagcgaaagtgtaaacgtagccattgatgatcggactggtgaaatttcctcccagagtcggcgctccggttccgctgtatgttccgattgcgccgctgtaacgatcgtatttttgtccggctgtgaaatctgtattatctacaatattgtaacctccgtttgcaggcggccaacctccgttcagattattcactttaaaaacagattccagttcgctccatttcccttgtttgtataaatcgtaaatctgatttcttaaggtctgatttactgtattcgaaggatcataagttgcagcgagttcatcggcgtttttataaaataccgtggttacttcactgggtgcattttcatcttctatggtggaagaagtacatgctacggaaaacagtacaaccgacagaaacgaaatgtaattgagtagttttttcatatatttcaataattattaattttaaaaatgtaaaagcaaaaaacagcctcagagatcgttatgaggctgccattactaatttaatttcatatcccaacctcttaaatcctttttttccaaaacacagcatcgctccagcgttgttctttctgataaaaaaatgtcttcgttgtgagataattatgataaattttattaatgttttcctgatagttaacaaaagtattttcgtgtcctgaatctgcatcaataatcgcttttgcagcatgacaggcagaacttatggcaaaaccgatccccatggatgaaataggatcaaatgatgcggctgcatctcccaccgccagaaaatttttgctagaactgatgtctgcaatctgagaaaatgcattttttacccaaggttttccttcggaagccgcttttgatattttatgctgaatgtgttttgtctttgataataacctgctccagttttcggtattttcaagccttttttctttaataatctgtgcatcggaaaaaaaagtaagcgtcatcttatgattcggcagagaagcacagtaccaccacccgtcttcaatagattctatcatgatgttctgctcaatggtctgagattcatcaaaataaaaaaatcttccgatcgcggcaagttcgtcataccgttttgactgaactcctattttccggcagacacttcccattcttccggttgcatcgatcagataatctgcttttatcgtaaagtttcctttggtttcgtgttttacatctaccgtccagtgattgttttcatcctgatcaaaagataaacatttcgttctcggaaaaataatccctcctttttcagaaacatttttcagaagcagataatcaaattcttcccgattaagctgaaaactctcggtttccgtattgaaaatagaatcacgaaccatcagtctttcgcttccccaagctgcagtactgctgtgtcccctgataaaattattctgatctaaagctgtcttatcaattcccatataactgagaagatcaaaaatacttgagttcacctgttcacctatttttacagattccagattggtttcttcaacaataacaactttcaggtcagaatatttaagcagacttaaagcggcggaagtccctgctggacctccaccgacaattaatacattagtttctaacaagttttgcattttatcttctgtttcgcgttccggaacgaggtaacggcatacggtctgctgcaacagcaatttctttaaatcctacctcttccagatgttccatcatcattcttcctttttcacttctttcggtaaccacctgtgttttcttttcgatgtagaaaaccggaattgtggtttcatcatcttcctcatttccactgatctggcttacaggaacattgtcatatgtaaatatttcgttatttctttcagtttccacaaagaatgggaaacctgcgctgtgagaatttttatctctgataaatcctagtgcgtaccagcactgaaccatctgcgtaaaactgttgattccacgcgcgtagttcatctgctgtcctgcaggaacattggtagccgactgaccttcagccgtaaattcgccaaccagaacatcccatggactttgaggcggccaccagtaagaataatatgttggaggaagcggtgcaggtggagaacccgccttgtttacagacggatctgtaaagttaattaactgaatggtacactggaagaaatctgcctgccaaggacaagccattcttttcgttagatctcccggttcgcagcctccgccttcacattcgtcgcgagatggtgttaaaccttgtgcttcatattgctgttcgtttccgtactgtaaaattctataaggatttgcataaataataggattctgtaaattccaggttacttcaattcccggacacatcggaagtcctacacaatttcctacacttgctgcatccattgcatttacaggatattgttcgtaattcggatcgcttacaaaatttccgtctgcccactgctgcatcaggaaaagctgtgtttcatccaatgccatgaatttcatgatattcgtattactcaccgagttgcttcctgaatttaaaggcatcatcgggaaaatatcagttccgttttctttcagaagctgttcctgaggtaaattaggaggaaccggcggctgagcatcattttgtctgaagtaggaaaaataattctgcctgttttggcggtttgcctcagaattgtctgtaaaatcaaaaatattgctagtaaaagccatcattgactgtacattggcaacccattgatatttgctgattctgttgataatcggtaaaatatctctctggaaatttgcctgaaagttcggattataacttccgttgctgtagatctcaggaaccagattgaaatttcttaccccgacatcgaacatcgtgtcgcttaaatttgaaatattaacaatttccggagcgaaatccggtgatccgataattacccacgctgtaagtgaaaccgaaggcgttccgtcattaaagtttaccgtacagtaaacaggtccgtccgaaatatcgtcgtgccatgtactggaacctccataacttgttaaaggtaaatttccgcccgcatgaccaaagcctcccaaaacaacaagccttcctgaattatctgtgagaagatctcccaacgtaaccaccggaacaccatataaaactttctgtggaggatattgcgcaggataaccggcaggaacattgtcctgatcgaatcctatcgaactttgtttgccggaaatggttcttggtcccggatcgacgattaaagtttgtctgtcatcctgcggcacatcaggatttctgaaaggaattttctgattttcgtagctgttttcctgaccgtacaacagattcccctgaagctcgctgtactgataccacgctgcttttttgtttgccaaatgtaccgtccattcgatagaagccacattcggagtgtctagggtgatttcttctcctgtgtctgaaaggattttaaaaggctgtccctgtcttttaataagacctgcagcatctttaaaggaggtaatcggtcctaaggaattcccgttgttatcagcatcaaacggtagaccaccgatggtgtccggagacaggcagatttcagttgtgctattccctaatcgggcaacacctactgatgggtgaattgatagattcatggtttaattatttagttttccctactcttttattggcttttcggttccgccttttataaatggttgtttagtttgttttataaatatcactcgcaaaaagcagcaattatttcgatgataaatttaaaatatttttctcatatattagtgaaattattataaataaattgaaaactttaaattaacaacaatcataaacagtttaatattattaattaaacgtttaataagcaaaaaaccttcggatataaaatctgaaggtttaaattattataaatgaaagttttaattgatgtttaaatagtctttaattactttcaggactccaaaatgatcattagatccggcttcaaaacttgccgctttttttaccagaggatgcgcattctgcatcgcataagaatattttgaattttcaagcatctgaatatcattcatataatccccaaaagccatagtctgctgtggagtaatacccaaagttttctgtaatttttccagcgcaacccctttattgatgttcctgttcatgatatccagccaatactgcccggaaaccaccacttcaagatcataattttcgaattctttcaacacaggataaacgtttaattccgaaccgccggaatgatacaccgcaaccttaaaaatactgtcatcaatttcctgcgtaagatcttctctatgctcgttatctgtataaaactgggaaacataatctataaaatcctgattatcggtttcaaaatatgcttttttcttgccggacaatacagctgtcgctccgggaattgtcctgattgctgcgataatttccgtgatatattttggatcaagtttatctgcaaaaagctcctcgttcttataaatgacataacccccattttcagcgatgaacgccatttcactttctatctcaccaaaatatttggtaatcccgaacatctgtcttccgcttgcaggaacaaataaaatatttctctttttcagttcttcatatattttcggaaattccggacttacttcatgggaagaatttaggaacgttccgtccatatctgtcacaatcattttaatatcattcataaaaatattttactgtaattctaatttataatacaaagatattgctattgttttaaattacagattctcaattttacgaaatggttaacagaaaatcatattgataaatttcgattgataaaatcgttcattttacaacaatcatcaaaacaaaacatttacttttgaaagattctaaataaatatcatttattctaactaatgtgaaaaatatataactttatcatcagaaattagataaaccaatttaccggaaaaaaattatctaaaactaaaactttaaccataaattcaacgagatgattatcaacaaaatcttcaacgtcgacgattattattacgacgtgttcatggcgatttcagaatccctcaccggattttccgtgaacgagctccaatctacaggcttagccgagatttattacaagtacattctcaaccagattgaaactgccacttttattgaatttctgaatatttctaaaaatgttctggaaaattcggcaagtcaggatcagctgaaaattgcgatcactgcagaaattattgccaatcctgcaactcaggaaattgcccagagtgtaattacgctttggtatatgggaacctgggaaggcgcatacgtaaacgacagatcttacaaagaaggtctcgtatggacggtaatgcatgcgcatccgccgggagcaaaacagccgggctttaaatcttgggaaacaaaacctgtaaacagcaactcatgaatcagacagaaaaacctcagcaaaaaaaagatgtaatcatcgtaggaacaggaatcgccggttctttgattgccaaacttttaacagatcacgtttttgataccgatgcaaaaaaaatgatccaccgttctgaaacggacgactccaaaacgtataaagaactatcgattctgatgtatgaagcggggcttgaagccggaatagaactcgattctgccacttcaatggttacttacaacgattacatccgtaagttttacatagaagaagccaaagttccgaattcaccgtatccgaacctgaaacaggctccctctccgaatgttctggatatagagccgattgttccgccgtttccggataaaaaaggttatctggtacagttcggtccgatgccttttgcaagtgatgccattcgcgtaggaggcggaaccacacttcactggctcggaactaccccaagaatgcttccgaacgatttcaaactaaaggaacaatacggcagagcgatggactggccaattgattatgagacgttaaagccttattatgaaatggctgaatttgagatcggggtttccggaaatgttgcagcgcaggaatatcctattaaggaaagtatggaagaatattatggtaaaaattatgtttttccgatggaagaaattccgcagagttatatggatcatcagattattaacggattggcaggaacttcggttcagctcaactttgaagaatatccgataatgcttgttccgtctccgcagggtagaaattctaccccgaatatagcttacggaacatccaaaatagtgaaagccgaagcttctgaatcgggatatactttaactttaaagaatattgaaaacgaagaatacaaagctttaggagcggtatggaatccttatatgggagaacgctgtgaaggaaatgcatcctgcgttccgatctgtccggttcaggcaaaatacaacgctctgaaaacattgaaaaaagctttatataaagttaataaaaaccagaatcttcagagaaatcataatattcaggttcaggcacaaagcgtggtgtacaaactgagtgtagatgtggcagatcaggaaaaaatttctaaagttcacatcagaagatatatttcaagagagaaaacagagtttgtagaagaggttatcgatacgaacgaaacaatcgttattcttgctgccaatgcttttgaaaatccgaaaattcttttaaattctaaatacactgttttcgaaaacgggcaaaatgttgaaaaaactgttgccaacagaagcgatcaggtgggaagaaacctgatggatcacatggtgatgcttacttggggattatttccggatcctgtttattcttacagaggtcccggttccaccaccaacatttcatcttttcgcgacggaaatttcagaagcgagttttctgcatggatctcacctctagacaactgggggtggagttggccggctttttctccgggatcagacctttcagaatttttaaatgacggacttttcggagaagaactgaaagacgcattaacccacagactttccagacaggttcttttccactttgaaatcgagcagcttccgaatccggataacagagtaactattaacgaccagtatctggatgtattgggaattccgcgtcctgttatcaattacgggcttacagaatacgaaatgagagcaatggagcaggcaaaattagcttcagaccaaatgtttgcaaggctgggtattgaagatttcaccaaatacaatgcgacagacaataatacttttgtatataataatgtaagatattcttataacggagccggacatattgtaggaacccacagaatgggcgacaatccggacgactctgtaacgaacagctattgcaaatcgtgggatcatccgaatctatacattgtaggagccggaaatatgacaactctgggaacttccaaccctactcttactttatccgcattcaccatccgttccgtagaatctattctgaaagatctggaaaccatattaaaatagaaaacatgagacaaagactaatcaataaaacagaacctcaggaaaacagcagccttctaagaagttcttcagataaaaataccatcgtagacgaagccatttctttgcagtcgttattatttgacaatacaaacagtaaagaaaactggattgaaggaataaaataccacagtaaaaacgtaaccaatcttttgcttaataaccagattgattcgtttaatgggtatcttagatcacaatttggcggtgaagttccggaaattaatccgaccgcagatttctccggagaaaaggcgtttcaggtaaaaaaaggattagaaaatctggattaccgtccaattttacaggatttgcttcagactgcgattttaatcgagcattctacaatccctccgtatttaacggctttatattctattaaagacggaacgaatattcttccttcacagatcatccgaagtgtagcggttgaagaaatgcttcacatgatcatggtttgtaacgtgatgaatgcagtgagcattcagccttcggtcaacagaccacagaattatcctaactacccgatgaaactcccaatgaacgtggatttctacgtaggtctggaaacgttctcatccaacagcattgcaacctttattgccatcgaaagcccgagtaatcctttggtaaaagcaccgaaatatgattatgacgcacaaccggaagccatgctttcaagaggtgccgttcaggaaaataatttatggaccttggaaaacatgaaggatttcatcatgaaaaatgttcataccattggagaatattatgatgtggtgttcttttacattgttgtattccagattattgcctattataaagcaaacggaaaactaccgcagacttttgaagaattaaataaaggcggaatttttaccggagatcccgcaaaacagattcgcccggaacaatactacggaagcggcggaaaactgtatcctgttgatgcattagaaggtgttattcttgtttttcaggaaattaagggacaaggtgaaggcgcggatgattctattttcgatgtagatccttcacagtttgaggaaggtgcggaactggctcattatttcagatttaaggaaatttttcatgaacatttttatttagggggagattacagaccgttcaccgacgaaaacggaatgatgcctgtaaccactccaccggttggaaaaccgcttcctgtagactggagtgcagcgtatccgatgaaaccgaatcctaaaatgtcagattaccagtcgaatccgcagttattcgaacagggaaaacaatttaatattacgtataaaaagttattggatgcgattcaggctgccgtagaaggacattctgaagaactggcaaaatccatcatgtatatgtatgcattaaaagagcaggcaatcggattgatgagtcagccattgacttcccaatacaatgctggaccaacttttgagtatcctgcgaactaaaaaatgaaaacaaaaagcccgttttttataaatgggcttttcaataaaattttaataaccaatttaccatgagcaatcaattacctccaattccgaaaggattcggacttcccttctattacgcaacactttataatttcgaagttgcctttcttgtagaccgcgaaaaagttttaaaataccttgaaaacacagggcttaccgcttcggattttaacggaaaagctattgtaagttttaattttcaaaactatacagggcagtttccacacggagcaaatacaactcaggaaatagaattgaatattgtctgctatcctgaatctcagaaagataccgttgcttttgttaccgcagaagaatatcttagaggggaagaacaaacgaaattaatgggacataaacgcgttcatgttccctgcgatgcagatatggcgatacaggccggaatagaactgttcggagagccgaaattcaaaacaacttttaccatcaatattccttcccttaacgttccgggacaaaataaatggacagtaacctgcaacgatcctgaaaacggcgaagaaactattttcacctgtaaagcagatgtcgcagatcttattcctgaaatgtcagctttttcgcccatcacagaatacgggcagaatgagggaaaactgattggatgccgttggaatattctacagcctaccaatttatatttcttaaatgccgaagaaagcagcaaacgtgtaagcatggaatacggaaactccgaacatccgatgaaaaaagatatggaaatccttatcggaaatactcccgcttttgcagtaagaacaagcatgtctgctccggcagccattcagacaagagcatattatatttaatgaaattaaaaactttaaccataaaaaaccattattatgaatttagaaagtaaagtaagaggcttaactttgggagcacaggttctcccgttacacaaagttgcatcgtcagatttgggagctctggctcctcttgtaggtgtctgggaaaatgtacagattccgggaaatgaggcttcttcgggttggaacaccatttccgtaccgggacaggatacgggctttgtttttgaggtcattccttatacagaaacactaacttttaatcctgttgtcgtacaggcaggaaacagaggtcccgttgtaaaaggacaacaggttgaacagctcattttcgggttattgtacgaacagcagatcgtaagtgcatgcgaaacaagcttctgtaacgacagaggctttccgaaaggttcaaccatacacgtagaaacaggtttatttttaaacatcgggcaaccgaacggaggttatacgattgcaagaatgtcgaccattcctcacggaaattctttattagctcttggaagttctttcgatgcagaaaatccgggaacaggcttctttgatcctgcttcgtctattcctacgatgctgaatggaggaccaattactcaactgggatattcggatccgattatcggaaatcctcagtttgcggaatttaatcaggtaaatccaaacgcttttcttcagtctactctggaaagtctggtaggttctaaaggaggagtaaccaacatgacagtgattgagatgtctacaaacactccggacgcgaatggcggaattttaaatattccttttatccagacgaatgtaaatgcaaccaaaatggatgcgactttctggatcgaagatattacggacagcgatggaaacgcagatcagattcttcagtattcgcaaaccatcaatcttgtttttccggcaacaggttctgcacagccgattaactggcctcacgtaacggttaatacgatgagaaaaagacaggaaacagagatgcagttcagaagcatggacgaaaatgaggcttttgatcctaccgcaggtcttaccccaagtgaaatttaaattttgtgatttcataaaaaaaccttcggagaaatccgaaggttttatttttacactgaaacagcttaagaattaaatggttaatccatgggtgtttttcacctgagccatcacaaaagtactgtgcgtgcttccaatggacggaacggctccgagaatattaaaaacaaaattctggtattgcttcatatctttcacgtatactttaagcagaaagtcaaaatccccggaaatactgtaacattctgccacttcttcgatttccataatttctctttcaaattctaccgcgagataactgtcgttgctttttagttttaactggcaatatacagtgaatcccaaattaagtttttcagcatccagaactgccgcatatttctttacatatccttcctgttccagtcgctttacccgttcaaaaaccggcgaaggagaaagattaacttcttttgccagttcttttacggttagttttgcatcactttggagtaatctgagtaactgtaaatctttactatcgagatgttccatagaatattattcttttagaggttattatttctccaaatataaagaattatattctacataatgacaattttaaagtttattttacttaattatatgacattgattattgttttattcttaatctctatttttactaaaactaaaacaccaagaatgaagatgctgttacaaaatataattataaagacatacaagtaaaagggaatattttatagcaagatcactctaattatggggtggtcttgttttgtaacccttactttttacagtttaaatcaataaatatacatttatctgataatattaaaaaaaatatttcaattaaaaatacacatttttagtttaaataatcttagggactacagttgcacagattgtgcaactgttttttttgctcttttaataaatttcaggtattgtatagccctccactgtggtatacgaagattatcaaaaccattacaatacctaaaaaagactaaaaataaaccattaaaaagaatattattctatgaataattaattttcattaacattaaagaagttttcactttttataaataaaattaaagattaatttacttatttatcttaaaaatatcaaaaacatacccattatacatacatttatgcgaaaattataattttattttctattgatttttaatcacacattaaaatcatcttcggaaactgtacacaaaaatgaaataaggttatctctgtaacgattattcacagattatataaacttttaacgcatgaaacaaagctattcttttttgttatttactattttatcttctttctctactcttctcttttcacagacttatcaacttacaggaaatccggttaatactaccggatggacaatggtagctccgacttctgtaaatacagatttcatccagttaactcccgacaccaataaccaatctggctctattagattaaatcagcccattaatctgaaatattgcgacaaatggagaatagaatttgatttcagaatggattctaaccagaccgcaaatggagacggtatcgctttctggtatctcgctaatcccccggttgccagtgtattaggttccggtcttggcgtttctcagaatgcagtaggatttgtggtaggatttgatacctataacaataccactactgccgtaatgagcaaagttcacgtcggttacggacagatcgtcaacacaacagacaccaacaatattgaatttttcaatgttccgggaagctcttttcattctccggatatgaataccacgcttccgtttcagggaacggcttacaaacatgtagaagtgaccgcacaggtagatccggcagctccggcaaactggattgtgaaaattaccatcaacggaaacctcatctgtaaccaatcttttgctccttccggaactgctgcggcaatgacggttggatattttggtttttctgcttctacaggcggaaacagatccagacattnnnnnnnnnnnnnnnnnnnnnnnnnnnnnnnnnnnnnnnnnnnnnnnnnnnnnnnnnnnnnnnnnnnnnnnnnnnnnnnnnnnnnnnnnnnnnnnnnnnntaccaatccgaataactataccttcgcctattatatcggaggttctcctatcactaatcctaccaattttcaatacagtacggataccaatgtatcggttgtaattaaagacccttcacaggttctttgcgataacaacgatgctacgattgctttaaaagttgctcctaccgttaccaccaacgatgcatctttaagaacctgttttctggaaaacaatccggcaactgggttatttaatttaacaacagcctcagtcatcaacacatcaggtgttgttaaaaattactatccgtcgttaaccgacgctgaaaatcagaccaatgaaatttcagatcctgtaaattatattgcgccaaacggagttgttttcatcagagtaagcaattctttcggctgttatgatattgcaaaggtgactcttgaagtcattccgcctgtattttccaatgttctggaagataaaattatttgcatggaagataaaacaaacttagatgcaggtcccggatttacaggctatttatggagtactggagcaactacccagtccatcagtaatgtgggcgtaggaacatattgggtaaagcttaaaacaggacagtgcgtggcgttgcaggaagtaaaagtatatgcatcagaacagcccgtgatttccagtattgatattaataataatgaagttacggttcatgcaatcggcggtacgattccttatcagtattcattggacggaattaaatggcaggattctaataagtttaaaaatataccaagaggtgacattaaaatttttgtaaaagatgcctataactgtgatcctattaccgtaagtgtattggttcctaatctaatcaatgtaataacgccgaatggagacggagtaaatgatttcatagattattctgcactcgccggaaaacaaaatcttgttttcaatattttcgacagatatggtgcacagattcataaagccgacaagtctaataaatacaaatgggacggaaccgcaaacggaagaaaaatatctaccggaaactactggtattccgtatcgtggaatgaaaatgataagaaaaatactcctgtaaaatattcaggatggattcttgtaaaaaaccgtgactaaacaatttcaaacaaataataccttataattttttagcatgaatttaaaattactttcaagagcaatgtatgcgggagccgtcttggcagcttctacggcagcagctcaaaatttccagccaatgctcatttcatccggacttaattccgatgttattgcaaacggagtcggatcttccgcagtaactacctccaccgatgtagacggcgtttcattcgcttttgtatcgagagattttcagctgacttcttccagcactccccttacttacggtttaccgaatgacggcattgtaaacagtgtagtttccacaactccgggattatcttataaattagccagttacagtgcaaacaattccctgaaattgtctaaccagaacgattccggaacaataactttttcaacgccgatagcagcatttaaattatatatgcttgcaaccagcggaagcggtgcttctaccgttacggtaaccgtcaattttaccgacaacacttcccagacctttacgggagttgcggtttcagactggtataacggaaccggattcgcaatacagggattcggaagaatcaacagaacaaacgacaccctggaatcaggaagcggaaccaatccgagattgtaccaaacattgctgacgttagatgcagccaatcagacaaagcccatccaaagcattacaattaccaaaacatcaaccgcacagggttacaccaatgtttttgcattttcggcagatgcttattccacttgtgcgcctcctacattgaatgcggtaggaactcttgcggcaaattccgcagcggtttcatggacacctgcaacgggaacgacggctaccacgtatgatatttactacagcacaaccaatacacctccggctgcgggagcaacacctaatcttccgggagtttcgggaacctcaactacaattccgggtttaaatcctaataccacctattattattgggtaagagcaaactgcagcggtgcaacaagccagagtgcatggtctttttcaggtacattcaagacgttatgcggagcaatgacttctatgtttgaggattttgaatcttatgccacaggaaatattgtaccggattgctgggcaagaattattgatacgaacgggagccagacaatcacctctacaactccggcttcgggcgtaagaaatatttaccagtacagctcaacgactcaaaatccaacaaccgttgttcttcctcagttcagcaatatcaatgcaggaacacattggttaagattaaaagcaagagtaagcacggcgacaggaacgctgaatgtaggatacgttacggatcaggcaaacagttcaacatttgtattgttacaggctttaagcatcagcaacactacttatggttcaacaagcgaatattcagtaattgttccttcttctgttccttccaacgcaagactggcgatcagaaatacagcagacggaaaatcttattattacgatgatgtctactgggaacctcttccgtcatgttttgctccttctgcattaacttcgtctaatgttttggcaaacagcgcaggaattttctggacggctccggcttctgctccggcaggaggatatgaatattattactctacaaacagcactgcaccaacggcagcaaccactgcatctggaaccagtacagctacttcaacaaccatcaacggacttgctccggctacaacatacaacgtctggataagatctgcatgcagcagttcagataaaagtaactggtggggacctgtttcggttacaacagcatgcgccacattatctgcgccatttacccagacttttgataatgcaactgtaccgaattgctggacgaatactaatccaggaagtaccacagcgaatcttttatggaaattttcaggaagtgccgattatggagccaatcttgccaataacggaagagcagcaggaacttacgcatgggtagatgcaagttctccttacagcggaacgggagccaatacagtacagctggttactccttctataaatttagcaggattaacgtctccttatatttcatttgaatggtttaaaaatcattctacctctacaagtactacagtgagtccttcaacctatgataacaacaaacttacagtagaagtaaacagcggaagcggatgggtttctctatggagcgacacctccaattctaaccaatggagacctgtaggaattcctttgccttcatcttacattgggacaaccattcaggtgagatttacggtagataaaaatgtaaatggcaacggttatttttatgacgatgtattgctggacaatgttgaggtaaaacagaaccctgttttggctacaggcgaagtttcagcggctaaaaatacagttaaagtatatccgaatcctttcaaagataccgtaagcatttcagatattgaaaaagtaaaatccgtgagcatcagcgatgtttcgggaagaattattaaaactgttgaaaatccttcaaaagaaattaatgtaagcacattaaattcagggttatacttgttgattatccgaatgaaagacggttctcagtataccgtaaaagcaataaaaaattaattattaatatttacattcgcagaggtatgtaaaaatgcatctgcttccagaaccttcggaatttccggaggttttattttggtaattcaggcagatctactttttccgttttagaggataaagtttttaaaaaagcttccaactgagatatttcttcatccgacagctcaagcattctcaccatacccgatttttgagaatgtaaagtaattccttcataaacggtagatcttttctgagaatattcgggatttcctttgctgtaaaattcaatcacttcttttaaacttgtcatagaaccgttgtgcaagtaaggtgcagttttggaaacctctcttaaacccggaaccctgaatttccctgcatcatccgcaacctttgtcactgtataccttccaagatcctctcctttttcgccaagtaaagaagttcccacattttcaaaacggttatttgaaaaatatcccgaattgtggcagttgatacactgcgcttttgttctgaaaagatgaagccccatcaattcatcattggtatatacttccgattttccgtcgataaacgcatcaaacttacttggagaactttttaccgttctttcaaacgtggcaatggctttggaaatgcggtctttggtaacagttttatcgccaaaagctttttcgaataaaatctcatagccttttatttttgcaatttttcctgccgcaatatcaatatgttcactcatttctctctgatcctgaatcggcatctgcgactgttcttccagagatgttgctcttccgtcccagaataaagattttgcaaaagcagcattcagaatggtcattgcgtttcgggttccgagctgtcggtcgtgcccgaaagaaaccgttctgctgtcgccccatcccaattccggatcgtgacaggaagcacacgcaatctgattggattttgaaagtctgggatcgaaaaaaagcgtttttcccaacagttctttttccgaagaatagagattatcttttggaaattccaccttcggcaaatgtccgatttccacaaaagttggggcagattcgggatcaagaacaggttttggccattgtgaagaatcgcctgaagaatatagttttctcaggctatccaagaacgtatttttctgattgatttctttttgaaccttactgtttaagcagttgtttaaaagcgaaaccaaaagaaataagatcaaaatccaacttaaactattcttcacgattatcctgagttttagcaaaaataggatatttaattgttttttagaatactttaaattcatctacaaaacaaacttgtttaccttaatagaaataatcatagcaacgacgaaaaatattcattaaatacggtattgtcttacaaagattttatctgctataaaaattaagcatcaattcttattaaaaatctttgattttcttgcgccttaaagatttgagacgaataaaaatcctgcgcgtttgcgttttccaataagactatttttattttaaaaagttcaaactctacatttaaaatttttactttaaacaacttaaaagtctaaaccattttatttaaatttcaaaaaaatcatgtattcttaaaaattttaagccaataaaaatctttaaaatccgtttttcacatgaacttttcccgaacgttgccaaagttcagattaaagcattaattttatactctcttcacatacaggagatgtaataatttatatttagcgaattattcaaataataaacaaacttacatgcagacattatcatttaaaattgccactaccgcagcagcaatttgtttcagtacggcagtttttgcccagcagaaatattctgtaagcggtactgtgaaagataagaaaaacggagagcttctgattggcgttacggtgaaagttgctgaagatcctaccattgcagttgttgccaacgattacggcttctactcgctttctcttcccaaaggaaattatactttgatgatctctaatccgggttttaaggattttacgaaaagtattaccgtagaagacaacatcaagcaggatctcgaactgagttccggagaaaacgaagcggaagaaagaaccggaaaaattgatgaggtagtgatttccggcgtgaaaaaagataaaaatctcacttctgcacagatgggaaccgaaaccttaagcattaaaaatattgaaaaacttcctgttctgtttggagaaaaagatgttctgaaaaccatacagcttcttcccggaatcaaaagcaacggcgaaggaaacagcggattcagtgtaagaggcggtgcgacggatcagaatctgatcttactggatgaagcagccgtttataatgcatcccatttgctgggatttttcagtacgtttaacagtgatgcgctgaaagatgcaagcatcatcaaaggaaacagtcctgcccaatacggaggaagactttcttcggttctggatgtaaaaatgaaggacggaaacaacaaagaatacaatgtaaacggaggattgggattaatcagcagccgactgagtgtggaaggtcctattcagaaggaaagatcttctttcattgtttcgggaagaagaacgtatgccgatgtttttctaaaagcaacagacgatttcaaagacagcaaattatatttttatgatctgaatttaaaagccaactatcagatcaatgaaaacaaccgtttgtatttatccggctatttcgggcgtgatgttttgggattgggcgatactttttcaagtgattggggaaatacaacggctaccctgcgctggaacagcattatcagcagcaaactattctccaatacttcattaatttacagcaactacaattataatgtaagcttaagcagcaataataatactttcggattgagttccaagattgaagactggaacctgaagcaggatttttcatggtttgcgggaaataagcattcggtgaagtttggtttgcagtctatttatcatacgattacaccaagcagtgcttccggaacgagtgtgagcagttatccaagaaatccgagaaattcctgggaaaatgctttctatattaatgatgattttaaagctaccgaaaaactgacgatcaactacggagccagactttccctgttcagcgttttgggaggtgatgtgtttaacacctatgaaaacggagttcttacagattctgaatttgttgaaaaaggaaaattcggaaaaacatatgttaatgtagaaccgagaattacggcaaactacaggattaacgaagtaagcagcattaaaggaggttattccagaaatactcagaatttacaccttttaagcaacagcggaagcggaaatcctacggatcagtggattggaagcagctttacggtaaagcctgaaattgcagatcaggtaagcttaggctacagcagaaatttcagcaacaacaattatgaaatcaatgctgaaatctactacaagtctcttcagaaccagatcgattataaaaacggagcccagattactttcgatactgcggcggatgtggaaagcgaactgctgttcggaaaagggagagcctacggacttgaaatcatcgccaaaaagaagagcggaagattaacaggatggatttcctataccttatctaaaacggagagaaaaatcgacggaatcaataataatgaatggtacaacgcaagacaggacaaaacgcacgatctttcagttgttgcaacttatcagctgaatccgaaatggactttttcaggactttttgtgtacagcacaggaaatgcagttacgtttccgaccggaaagtatgaactgaacggacagacgattttccagtacagcagcagaaatgcagacagaatgcctgcttatcacaggctggattttaatgcaacgtacgaacctgtaaacaataaacgctttaaaggatcatggtctttcggtatctataatatttacggcagagaaaatgcttacaccatcacgtttgaagacaatccggataagccgggaacaacacgcgcgatgcagactgccctgttcagatgggttccgaacattacttataatttcaaattttaattcatgaaaaatatatttttaatcatactgtctttatttttagtcacttcctgcgaaaaagaaatagatctggatctggaagatcagagcggacagattgttattgaaggaaacattaccgatcaggcgggaccttattttgtgaagattaccaaatccgttgcctttacacaggcgaaccaatatcctgctgtgacgaatgcgcaggtcattctgagtgacaatacaggacagacggaaacacttcagtatgccggaaacggaaattacaaaacgtccacctttgtgggacagcccggaagaatttatacgttaaccattaatgctgaaggaaaacagtataccgcacagagtacaatgccacaggctgtttctttcgacggtctggagcaggattctttccttgtggcaggacagacgagctatacgcttctgccgcttttcacagatccggcaactttaggaaatcgttatctgtttgtgtataccgtaaacagcaatccgaaaaaattcttctccgaattttccgataatgtgaacaacggtttaccgaaccagagacctcttctgcttcccaacgatgacagcaacgcaaatgatattaaagtggttgcaggagatgtcattcatgtagaaatgcagtgtattgatgataaagtgtatacctattattctgcacttcttcagctttcaggaagcggtcccggcggaggaattactcccgccaatcctccaagcaacatcagcaacggcgctttgggctatttttcagcacatactgtaagaacaagaaccgctgttattcagtaataattaaataaaagctatctgtactttccggatagcttttttttagcttctgtaaacaattgacctttcagcctttaaaaatttattatagaattaatacgatgtgatgtaacaaatattctctttacggtgtcttatgtaggaaacatagtttttttacatgaaaaatattttgataccgattgcctttttagcgggcatatttacatttgcacaggctgaaaaggatactctaaaatctaaggagaaggctattgaaggagttaccgtaacggtaagaaaaccaaccattgaatccaaagtagacagaaccgtttttaatgtttccaacagctctattctcgcaggaaacacgacttgggacgtcttgagaatgactccgctggtaagtattgataacaatgatgccataaaagctgaaggagaaaccgtaaccgtttacatcaacgacaggaagtctgtttttacaggaaaggaactgaaagaatacctgaaaaccattcctgcggataatctgatgaagattgaagtgattacaagtccgtcttcgcgctatgaagccacaggatctgtcatcaatattgtattgaaaaagcgtgatgatgaaggaattaaagggagcgttactttaaacaacagacagaacaccaaaaactctcagtataccaacctgaatttaaattatcaccgtaaaagctttacacagaccttcatcggaagctacagcgacaataccaatgtgcagagcaattccagtctttataaagtggatgctgaaaattctgaaacttacagaaattctaaaaccataggaagatacaaaagtccttccctttcctccacttcagaacttgaactgaataataaaaatacagtaggtgtaattcttgaatattaccaaagcaactcttcttccaataccgatgcagacggattgagaaatgttaacggactcttcgaaaattcttatcttcagaaccaaaattctacgggacttaacagaaacttcggctccaatattttttataaatggtatgataaggaaaagaataaaatccttgacattaatttgggttccaattactacggacagtcgagcgacgattattttgtaaaaaatatgatgtacaaatccaaaccggatgaaaaacaggaaataggagttcttacagataccgaaaacagaaattattatctgaaagtggattacacgcagcctatcggaaaagaaggcggaaattttgaaatcggcggaaagatcgatttcaataataatgtgatcccaaacagcttatatggaaatatgcttaccggactcagttccggagatgttttccactatgaagacaacatcagttctctgtacgccaactacagcaaaacattctttaaaaaactggaaaccaggatcggactccgttatgaatacatcgattataaaatacgtcaggataatgcaggaacttcgagaagagattcttacggaaaactgctgcccaatattttattgaaatattctttttcagacaattatgatttaagtttaacgtataacaaaaatatctggagaccgtggtatgcggaattcaatccgttcatgatcccgaacagcgacggattctacagccgtggaagcatcgatctggaacccaacccaagcgacagggtttatatgaagttaggcattcataaaaaatactttatctctgcgagatatatgtttaccgatcaggattactggaccaattatgtaacgggaacgattaatgatatcaacggaaatcctcaaaacatcaccattacgcagccctccaactttttcgggaaagtgcataagtattacgtttttgccaatacgaaccagactttcttcaaaaataaatttacggtgaatctcggattgggatggtattatattgacaacagcgattttaacaggaaaaacggtttggaaaatgcgaataactacatcagctatctgagtgcttctacgaaccttacgtacacgaatctgtttaataaaaatatcaacctgagcgcatgggtggaagtttctaaccagaacaacggaaattccacaacgaacaaagcgaatgtcttccataatatttctgccacgaagatattcccgaaaacccagatggaagtcagccttcagctcatgaatattttccagagaccgaattacgatgccaccacttttgtgcagggaggaactttccgaaacgcttcgaaatgggactggtacggagcctctatttcatttgtaaaacgtttcggaaaccagaaagtaaaagaaaataccaaaaccgatgttgagaaaaacggcggcggcggaaaataattttaatgttaaattttagtacggacgatggatgaattttcattgtccgttttttttattgaatttatttcaacttttttaaaacaaaaatattttttttggaaaacgcaaagacgcaggatttttattcgtctcaaatctttaaagcgcaagaaaatcgaagattttcaataaaaattgatgcttaattttatcgcagataaaatctttgtaccttaagacaagaccatatttaatgaatattttacgtcattgcgatggttgctattaagtattataaacttctcatttactctaattttcacgttctaaacctcaaattatacgttcttaacctatcgggatatattgtgtatggtttcggatacgttctctactctttcgaagacgttaaataatggtttgaatacgttattcaacatgtccgttgaggcttttgatgcgtccgttgaggtcttgaagatctcgtgatacgtcatgtagatctcgcgacacgttttatatcaatacgaagatgtgaaagaccattccggaagagtaaaatacgtctctcaaactgtccggaacctatttggatcattgaataacatatcgggatcgatggataacctcattggaatattaaaagacgtgttgattgaggtttaatagatgttgagcagagattgttatggtgcttttttgaaaacgctaagctcgctgaggttgctttgaaatttatgagaatatttttcgagcgcaagggcgtgaaactcagctaatgataataatgtttttaaatctctgaaatttttatttcactttaagttttggctaaagccaatttatttcatagaaacattaaaatgggctaaagcccattcttacagataatttgtattggttttgaattgaactcacgttaattttcatcatcacacttaacgttcttttttgaaaacgctaagctcgctgagatttgctttgaatttatgagaatattttttcgaacgcaagggcgtgaaactcagctaatgataatcatggtttttaaatctctgaaatttttatttcactttaagttttggctaaagcaaatttatttcatagaaacattaaaatagactaaagcccattcctacagataatttgtattgattttgaattgaactcatgttaattttagtcttttacattatctttttttcgattttaagtattaaacttaaacaactaaattgttaaaatcttttgcttcttttgccggaaaaaagtttagataagttttataataaaaaagccggaaaaagatatttcatctttttccggcgctgattattaaaaattattctgaaattattgtttacggatacggtagagtctgcctccgtccgtcactgcatataaattgctatctgttccctgtgtaatatctctgaaacgctggttttcggatgaaagaagcctttcttcgcctattactttgttgttttccagaaccagtcttgcgatgtgcattccgcttagggaagctacgaaaagattgttttgccactccggaatggtgtttcctttataaaaagtgattccgcttggcgaaattacaggatcccagtaataaaccggctgttccattcctgcctgctgctggattcctgagccgatggtggctccgctgtattcaattccgtacgtgatggtaggccagccgtaatttttgccgcctaaaatcctgttgatctcatcccctcctctcggtccgtgttcactctgccataattctcccgttacaggatggatggcaattccctgagggtttctgtgtccgatgctgtataattccggcaacgccccggattgcgaaaatgaaggatttccgggagcgggttgtccgctggttgtaattctcaggatcttacctaaagctgcggttaccgactgtgcaagaggtcttgtagaaagatcagaacgttctcccgtactcacaaacagatttcctgtattatcaaaaacaattcttcctccataatgaagatttcccacattggcagaaggatttgccctgtaaattaccgtcggattttctattgttgtttctgaatttgacagtcttccttttgccacagaagttatatttccgcctgaaacattttcagagaaaacccagtataccattctgttggaaataaactgcggatctacacaaagtccaagtaaaccaccctgtcctcctgaatttacggaaggaagcccggtaatggcattgcttacggttccgttactgcttataatcctcatggttcctgctttctcggttacgagaagtcttccatccggcagagatgtaattccccacggcgaagccaatgatgaggtaacgacttcacttacataaggggtagaagtttttgcgccattcgctctcgtctgtcctgcaaaagccggctgataattcgtattggctgcattggattctaccggaggaagcgaaggggtattagtccctccattttcttcgatggtttccgaacagcttgccatcatcagcgaagcagcaaccagtacataataggttcttattttcatatttcaaatgtttggtgtttcttatgcaaattttattttgtgcaacaaattacttgccgtaaatacagaatcagttatcagatataaatacgattcaatcggttgcactattttagggtatttcttatattttaaatgatgattaagaaaattttaagatttaaaatgaaagtatggcatgaatattattatagtattacaaacacgtttaagatggaaaacctgttagccaataaagatttaataaacaagtatttaagattagtcattaagcagcaattcaatacagaaattgatttgagaggagaatatacatttaccgaaaatctggtttccaaaaaaccgattattgccactactttctcggaaaaaattctttcgcagcccgatataaaaatggttttgacctctgtaatcacagaaataaatatcggagtctgtacaacagaacagatgcagaaagcagttgaaatttatcctgaaaccgattctagggaaatgcaggaaattgtttaaataaaactccctgtacagctttgtacagggagttttattttttgagagaaaattactttaaatttttcgaatattactgcagatactgtgcaactttatcttctaaatcttcaagattgaaaggtttggcaacataatcatccgcctgagcttctttcgccaaggcaatgatatcgttgtttgccgttacataaatcacgggaatgtttttaaattcctgatgatttttcagaagccttgttgcttccactccaccgattttcgggatccagttgtccataagaataacatccggctggaactgctctactttctccaaaatgtcatgtgaagtttccgaaatttcgacctgataaccattttcttcaaaaatgatggtgatgacttccaaaatagttttatcatcatcaaaaatcaaaattttcttcttgctcatatctatttaactttagttaggggttatatttttataactgattgatgtactctgcgagattaccgggctttataatcagatcaaaattaatttcttccattgcatgtttcggcatataatctacttctgcggtttcgggatcctgaatccagacttttccgttgttttttttgatgtatgccaaaccttccaccccatctgcattggctccggaaagcagtacaccaatcatcctttccccataaatctccgccgcagatttaaaggttacatctatggaaggacgggaatagttcatcttttccgagctgtccagagacatgatgtttttattttcgaataataaatggtaatctgccggagcaatgtaaattttattattctgaatttcggtcttgtcttcaatctcaataacttccacaggcgaaaactgctgcagtaaggtctgcagaatattgttggaatgtgcttttctgtgaactaccagcaaaatggcaaaatccagcttttcgtttatttttttaatcatttccagaatcacctgcaagcttcctgcggatcctccgataacaatcagttcgatatttgtactcttcttcatgataaaaacagcttactggtgatctatttttttccatatcttctgatcatccacctgattataatttttgtctaatttaaaaaatctaagggtttcttttgcacctaaagctaaaaaacctaaattttccagactgctgtcgaaaagttggaatactctttcctgaagaccgcgatcgaaatagataagaacattccggcatataatgagctgaaaactgttgaaagaactgtcggaaacaagattatgggtagaaagaatcagcttttcctgaaggcttttatcaaatttcacactgtcgtaattcgccgtataataatttgaaaaatcctttttcccgcccgataaaatatagttttcagaatacagtttcatctgctgcaaaggaaaaactcctgctcttgctgtttccagaacggaaggattaagatctgtcccgtaaattaaagatttatggtaaagatttgcctctttaagcaaaatagccattgagtaggcttcttctccggtagaacatcccgccacccagattctgatgagcggataggttcccaactgcggaagaattttctcccgtaatgccttaaaaaactgaggatcgcggaacatttccgttacattcacggtaatctcttcgatgaatcttttcaggtattccggatcattaagtattgtatatcttaactctgcaaagcttgtaaatctgtcgatcaggcatatacggttcaccctgcgcttgaaggaagcgcggctgtattctgagaaatcgtagccgtacatatcgtagacatctttaataagatattctacttcttcatcttttacaatacttggttccagcatttacgataatttttctatagcgttcattaaaaggtctacatctatcggcttggaaacataatctgccgctcctgcatccagacatttctggcggtcttccggcatcgcctgcgcggtaactgcaattacgggaatattgctgatagaaggtgtattttttatcatctttatggcttcatacccatccatttccggcatcatcatgtccattaaaaccacatcaaaatggttgtctttatttaaaacttcaatggcttcctgagccattgtactgctttcaatgtggtatcctctggctttcagggtgagttttaaagcaaatatattgcgcggatcatcgtccacgataagaatttttttattcatcagaattttagctgtttaactttcatataaccaaacacgaagtaaggatagtaactgatcgatatccaccggtttggagatataatctgacgctcctgccgtgatgcatttttcacgctctccgatcatggattttgcggtaatggcaataatcggcagtcttttgaatttaggcatttttctgatttccttgatcgcctcataaccgtcgagttcaggcatcatcatatccatcaggatcacatccacatcaggattttctttaatctgctgtatcgcatggtttccgtccattgcaacaacaacttctactttgtatttttcaagcgctttggtaagggaaaaaatatttcggacatcatcatcggtaatgagtatttttttaccgcttaaaacttccgtaagcgatcccattgttttgcttcttacattttcaatggaattatttttctcttccaccagatgcaggaacaatcccacttcatccagaattctctggtaagagtgtgctgtttttacaacgatggagtctgcatactgctttattttcagttcttcggatttggatagatttctttcggtaaagatgatgatcggaagattctccagtccttcataactttttatggattctataatttcgtattcgtttcctcttgaagctccgatgtccagaatgacacagtctacatgatttgccgttaaagctttcacactgtcttctacattattttctactgacaacgaaatattgaagttgctgaggaaataagacaatgcacttgcgtgttttgcgttttcttctacaattaatactttctgcggaccttttttaagggcttcttcaatctttctgaaaacatcggtcatctgatcgagtgcaacaggtttgctaatgaaatcaatcgcccctttcatgaggctttcattctttacatgaagcgcagacatcatgtgtaccggaatgtgttttgtttccggattggactttaaatcgtccattacctgccatccgtcttttacaggaagctgaacatccagcagaattgcctgcggacgatattccagtgctgcagacagaccgcggtctcctcttacttcaatcacagctttgtagttctgtaaatgagcatatttcagcagtgctttggcgaaattggtatcatcttcaataatgagaatggttttatcgccttcctgaatggtatttctgtcgtcgtccacattttcaggaatctgaagggtatttaccacttctttttcttccgtttgtttttcatcaagaatattctgaatttcttcaacatcttcacgaatgatttctacgagattctgatctttttcaacctgaggagcttcagtaattgcctttacaggaatgcttaaactgaattcgcttccttcgtctactttacttttcagggtaagttctccgcctaataatctggcaatttcacggctgatagacaatccgagacctgttcctccgaattttcttcttgtggaaccgtctgcctgctgaaatgcttcaaaaataatcttctgtttgtcttctgcaatcccgattccggtatcttttacggaaaagatgataaaatctgcttttttaggatcttttttaatgtttaaatcgatgcttccttttgtggtaaatttcaatgcattcgataataggtttctcagaacctgatcgactcttaaacggtcggtttcaagatttttctcaagagatttctcgatattgatgttaaactgaaggtttttctcctgaaatacaggattgaaaagatcttttaagtcttttaccacatcattgataacaacatcctgatattccagagtcatttttccggattcaattttagcgagatccagaatttcatcaattagggttaataaactgcttccggaactctggattacttttgcagactctatctgatcttcgttaagattttcatccggattttccgccatcagtctggaaagaagaaggatggaattcagcggcgtacgtaattcgtgggacatatttgcgaggaattccgacttgtattttgtacttaaagccagttcttcgacttttttctggatttctgtgttgcgctctgcaatcagatgatttttttcttccaataatcttgaacgttcttccagctctgcatttgcctgcatcagttcttcctgctgaactttcagctcttcttctgaagcctgaagtttctgggtctgtgcttccagttcggtattcagattttccagctcagaatgctgtacctgcaattcttccgactgcgcctgtgtttcttcaagcaactgttgttctttttcacggccttttgccgcgcttaaagcaattcctatatttctgctgcactctacgaaataatcgactctgtctttttcaaagtttgtagttgaacctaattccagaactccgataatgaaaccgtctgcaaaaatcgggattagcataattccgtaaatctggatggtgctgcttgcaaaggttaccacaaaatcatcttcatgaagattattgtacacctgagttttttcgctgatgaaagtctgacctaccattccttctccgggctcgaaaacttttttcatgttgttttccagtccgaaagcgatgttcagttttagtaaaccttcatcatacagataaattgatccgttgatgcagtttccatattcaataagctgatgaagagatgctttggcaacgtcttttaccgatttgtttcctacgagagattcattaagaatggcaagacctttctgtctccagtcacttttattaatagtatcaaaagacaatttcaaagattccgtcatgttatttaaagaatctaccaagtcgccgagatcatcttcagccgtatctacgactctctggttataatctccgttggcaattctgttggcaatctgcttgattgcgattactcttctggacatttcctcatcttttgctttcagcattttttcaagtttgtctcttcggataagatctgctcttagttttacatagaaaaatgcggtaacgatgatggcggcaatggaagaaaatataatgaagaaaacggttgtgcgtgaggatttattaagatctttggtttttacagcaagctgattttcttcgtattcggagaaatcttttacaatctgtctgcatcgatccatatactgcttactgtcttccatctgttcctgcgtcattacgatacctcttctgcggttttccacaaagagtttcatattggcaagattggtctctacatttttttccagaagatccagaagtcttttctggtttggatctgtaatctccaggcttcttgcatattcaaatgtctttgaatattctgaaatgcttcttttaaagggttccagaaaaacttcctgaccggtaagctgatatcctctgtttccggtttccgcatcaagaaccgcaaccagaatatcttttaccgccgttacaacgcgtctgctttttccaacgctttcacggtggttcatctggttctgaatgctgaagtaggaagccagtgaacttgcaatcaggatcaggatggaaaatcctatcccgaactgaagatttcttataatttttttcggcatggaaaattaatttaaaggtaaagtgaaataaaatgtagatccttcatctattttgctggaaacgcctatatttccgtggtgctgctttataatttcggaacagataaacagaccgatccccattccctgaaactgaagtgaagattcttccacacggtaaaatttattgaaaacagcttcctgcttaaaatccggaattcctattccgaagtctgtaacacttactcttacttcctgttcttcttcgtctacaaaagtggttacaatcacctgattgttttgaggtgaatattttatggcattggttaaaaagttaatgagaacctgctcaatacggatagcatctagcggaataagaatatcgggtttagttccgtcgcgtttaatctttactctgctttcgtgtgtctgtacgattgtatcgatcgcgttgctgatcacgctttcaagatttacaggttttttggtgattttcagttttccgttttcaattttggaaacgtcaagaagatctgtaattaaggtattcagtttttcgatctgatcctgtactttggtcagaaagccggcttctgcactttctttatcaagcttcagttttctttccagtaactgtacgtaagctttaatactcgttaaaggagttttgagttcgtggcttgcaatactcaggaattcatccttttctttctctacttttttctgattgtctatatctgtaaaggttcctacccagtttttaattgtatcttcctcgtatacaggagttacacgtaagagatggtatcggaaattgccggattcaatattttttatcctgatttcaagttccagagattttccttttttcctgcatcgctgaaattcttcctgaatattttcatcatcgggatgggtttcgggaaaatttttctcagagtgcgaataatcgtaccatttgccatttacaaaatctacaattccgtcttcattaagggtaaaagcaatctgcggaagagattcgagcattaggtgaaaatggtcgatctgcgacttcatggttacctgagattctcttcttccttttacttcgagctccagactttgctgcgtttttttcatcgcaatattctgttcctgcaggttgtagaaagttttcactttcagcatcagaatttccggatccaccggttttgttacataatctttacctcccgaagcgtatccgcgtgtgataaatcttttctcggtatttacagccgaaaggaaaataataggtacttcctttgttttgctgtatcctgctaaagtttccgccacttcaaagccatccatatccggcatttgaacatccaaaataatcagtgcgtaatcattttttaatgccttcatcagcgcttcttcaccagactctgcagtgtctacctgaaaacttttggattcgagtagttttttgagtgaatagagattactttggttgtcatcaacaattaagatcatataaacttaaaatcaataattaattatatttacttcagcttcaaaaatactcacaatatttcgaaaaacaggaattttttacctattatcaaaacacataccacaatagcagaaaaaaaattttatgatctataatttttcacaaaaaatttttgaaaatttttctttcttcaattcagcgatttaagagtaaaattttaaccacataccacatttttagttaaaattttaatttataaaaattattcacggcacagtgtttgaatacaggatagtaacactttttcacttaaatatatttttcaaaattaacccacgttttattgcgtgggtttgttttattgttcttatatttgcatcgaatttctcatgtttaatttgagttttcatggttattagtttttatccccgccgaaagtcggggatttttttatgtattttattcaagatatttcacttttttaaatcgcttattttctgaatattattcttaaaagtgattattttgtttaaaaaaataaagatgatggcacaacttgtgatatagactacgcacacacttaaaatcatagatatgtcgatacaaatacaagttgcccgatgcacacaatgcaaaggctatacttccgctgccccgcttgaacagaaatataataaccatcctgatattattgatcattatttttatcacggagaacctgcatttacgctggatctgaaaacttttgaaaagttcagaaatttagaaaacacagagatagagattgttgagcttcatgagcatgagaaaaacgatcatcaacattgtaaatgcgtgaaaaaatctgttcaaaaagcattatctgctcaaaaagaagttttcagtatgccaaaaaatccttttgctgcagaaaaaagcgaaatggataacgagatttattttaaggacttgtattatacttacaataattttcacggtgtaagttcttctcaacagtatggaaattccggcagaaaattccgctaaaataattttgtaaaaacaaaaatctcttcatatttaaagaagtacttaagatggtaagttaaaggcttatgttcttaagtacttcttttgtttttatagagattcagcatcattcaattaaaaaattaaattcttttctgtattgtgacggacttttctgaatgtattctttgaaagtcttattgaaataactgaaattgttgaagccggattcaaaacagacttccgtaatgcttaagggttgttctgcaagaagctttaaggaatgggtaattctgtactcgttgacaaactgtgtgaaggttttattggtgatttttttaaagtaccggcagaaagaaggcactctcatattggcaagatctgcaacctgctctaaggtaatctgttctttaaaatgatcttttacataattaaaaataagattgattctttcattgtcttctacctgggtctgaagatagtattttccggcgttcagaattctgtaatctgaagttgaagccaaagcatccagaatctcaagaaatttcatgagtttttctaatgatgcggattcgtgcatgacaacaatttgttgccctatttgttttttgatgttttcggaaaaaacaattcccgcttttgacttttccagcaaggcagaaattttctgcatttcaggaagttcaaagaagttttctcccaaaaaatccggcttgaactgaattaccatttcataatcgttattggtgttttcattcgtcattccgcagtgcggcagattacttcccataagcacaagatctccgtcggaaaagtaagaaatattacttccgatctgtctttttccggaacctccgcaaacaaaaatgagttcaatttcaggatgatagtgccatacatgagattttatattctcgttacgaagaaatttaaggcttgtaaaactgcttcctatattaggttttacagcttcaaaggcgggatgcgaatgtttcataagcaataataaaattcatatacaaaattaacaaatattagatcaataaacatatttaaagttaaaataatacataaatatgaaaatcatgtggtagtacaatcttgaaagagcagctaaatttgcaatataaataactgataataaaaatcttatcaatatgaaaaaagtatttcaatccgtttttacagcagcttttttatttgtttctgcaaatgtaatggctaaagacaaagatttttctctttctttcgcatcgtctacttctaaaacgatacgttttgaagtgaacaacgcaaaaaatatttcgttggttatttacaatgattcttatggcgaactttattccgaaaggcttgaaaatgaagattcagtgataaagacttacaatctggaggatttaacagagggaacttattaccttattgcagaatctgagcaaaagattgaaaaatataagataaagattagcgatgataacaaggctgaaattgaaaaaattccttttgccgtcatcagcaaaccggaattcagcgtatcagatcatattgttaaacttcatattggaaatctgaagaacaaggtaagagtttccgtggctgattatgccggaactacttattattcttctacaaaagaagcagaaaatggtgaattggatatgacttttgatcttgatcctaataccgccgatcactacatcatcagtattgaggaaaacggcaatacatttaacagaacaatcgctttgagataagagattctatacattcccgtatttatatcggaattaaaattttacgtacaattagtttattaaggcagcttttcttttttaaatcacggagaaatggctgccttaatttttttaaaattatcttcctgatacaaagccgtttttgaaatttataccaaaaaccttaaaaattattttgcagaaaataaaaatagttctatatttgcaccactgaaaacaacgatataatcggagtttctggagagttggcagagtggtcgattgcggcagtcttgaaaactgttgactgtaacaggtccgggggttcgaatccctcactctccgcaaaaaaaccttcaaatttattttgaaggttttttttatgcctgaagtttaaaattcttggatcattcggatcattgcagaatcatagttgttaaattttctttttcggatcaatcgcaaaacttgggggctatgcaaaaagtttagtcaacctaaataggaagaaagttctgtcttttactctccgcagctgcattctgaagtttttgattttggcattaaaagattccgcaacggcattggtgcttctttgatgaaaatagtttaaaatatccctgtaatgattcattattgtttttcttaaggtagaaaaaagatttaaaatctgcttcttccacctctttgaaccaatgcgccagtttagtcatcgccaatgattttggaatattctgattataaatctttcgcagtccatcggtcaatcgatatgctttctnnnnnnnnnnnnnnnnnnnnnnnnnnnnnnnnnnnnnnnnnnnnnnnnnnnnnnnnnnnnnnnnnnnnnnnnnnnnnnnnnnnnnnnnnnnnnnnnnnnnaaccgaactattcagcctattggaaaattctgtggcggatgcttcccgaaagatagccgagcttttggatagtagcctttcaactgaaacagaacccggttcttccaccttgcggaaaaatgatttggggaattttgacattggggagttcttatagacttccctttgtctttttaaattccgttttccgagaactcttcaaacgcagaatagttttttattcctttagacttgttcacttttcccataattgtgcaatcaatccggctttttagataggatgctaaatcatcaaaatgccgaacatcaatataattaattcctgatgctttatatcttttagataatgaaatagtaaaagcagcccagttgaatttttctccctttttacttagttcaatttgtttccaatcgccatatcttttttttaaataatcaatatagttcttcttagaaagctctttccccaatgctccgtcaggtaattcaatttttgcttttacaggcttggatttttttacaaactttggaaaatacttatgtagcaaagcctctgattgttcaatatgctttgtaacggtgtcccatccccaataatataaatgaaatggaagttccttttcttttctgatttgattgaggtattcctgtatttgcacatcgtcacggaaggtagaaacaaaaacaaatttgtcgaaatcaatagctaagtccctcgatttttctaaatcggtgtttatatcctgaattagatttttcctgatagtttcatcctttcttccaatgctcttcaatttgcattgaataaccgttttggttttagtagaaaagacatcaattcctttctgattttgtccttttacaccaaacgtctgaaagtctgtattctcatatgacgaagtattctctacaaaattgaataaatcacaagtaagttcctcaaataacctttcatcttttaaaggaggtagttgatagttcgccatctaaaaaaatcgtttaaaaattgtttcctgttcggtatctgaatattcagcaatcacttgttttgaccaatcaaaatcaaactttccaaacttattttcatcgccgtttaaatcaatttcatcttcattgaaagtaagtatatattgaaagttatgcagctcgttcgatttgtggtacatatagttcaggacattggatattgttttgtatgatatggcgtgaaatacaccatcgtgtacaagaaaatcagggatattgcgtttatcaatcctgctttttaagaataccattaaatcatacgctacaattttcaaacgttcctgtcccaaagcatctgcttttggaatttccagacttattttaaatggcaactgatttcttggcgaagtagagtttaatgtgatattaaaataagaattatcaaattcttcatccaaatagatagcattttcaagaatttgctgaaataataatctcaactcatcaagataggtttgttgcttatttagttcactaacaatatctctctttaattctgcaatgacaatattggaatttcctaatatttcctctatttcgtcaatttcccttacaattgaggtgttccgttctaaaagtgttttttcattcactaatctttcgtaggtactctcaatcctgtccaatgcacctctctcttttagcaatgaaaataattggctcctgttcttttctaatttttcaagctgtgttaaactttggtctattgatgattgtaatttcttttcttcttccaataaatatttatttctattcgccagaagttgttttttaaagtctataacttcatctaaactcttttttacaaagttgccaaatgtagatacggtttcattgtagagcttacgaattttgtccaggtcgatagatgttacatcattgtaagaggatttgagtttttctaatttacggtttgtattatgatagatgacagattgctcgttaatttcagatataacctgatttagcttttgctctatctctttgtgattagcaagaaagttgtactctttcaggctattctcaagtgctacaatatctttttcgatttttagccgctcggttctaaactcctgaatatctttccctgtatctgccttaaccttttctgataatgattttactgtattattgtatctttcatattcagaagaaacttcgttatattttaaaagtgttttagtcgggagattaagcaaataaaaattatacaacgccttttctcttgcattggcgttataagaaacaaaatttaaagggtcaactctctgctgactttgcaagtcatccttaacaaaaaattccatcaacgttccatatctttttccctcaaagaatacttcgttgttctctgtcggaaaaaatatcccttccagcaatttcggcatttcagatttttcatattcatcgagagcatccggtcgcttcccgaaaaatattttttttgtatcggcaaagcccctcttgagaaaatatttttgttcctgtacttcaatttctaaagtaatcgtgtgttcatcctcacgtaaaaagtcatactttttttgagcaaatcttttttctgctttaccgcttagtaaggtaaaatcaacaagcctgaccaacgtagatttgccaataccattaatccctcgtgcttctttatccccagagtatttgcccaatatgatgtttattccattgtgaaatggaacagcatctataaggttggtttctgaatatattctaattaacattgtcgaataaacttgtttgattttcttcttggctttctttctttaccaatttaattttatatccttttttctcaatactgccaattgtatgcaaaaaggttaaagcatacagaaaaaggtcgggtgttctatctttatccctgtttaaaaacttattcattatatcatccacgatggtatatttgtttttaaaaggggaattgcccataatactaataatatctgctcccaataccataagattggttttaagattgctttctggctgcggtaatatcatagttcattttctgtttttctgcctattaaacactgctcaaacatataaagcaatatagattttacacacttcacatattcatcatctttaatgtttccatatgctgttgtatattggtcggttagattatataatctatccttgaaatttcctgaaagtttattgtaatcatttataactcttcttttcagggtattaatctcatcatcgttatatcccgaaagtatattggtaatcgtgttaaattctgccataaccagtaccatttccgagttcattccatcccaatcttcctgctcaaagttgagttcgattttcttttggggagggactaatgatttcctgtcgaaatgcagagccttatcttcttcgcttgaagcattcaataagtcattaataatttcctgaatatagtcctgtataaaaaagttctcaatccccaaataagctgcaagttttctttttttacttgatacaagttcatcaacaatagaaagaatttggtctatacccttaatcgaagtatcgccgtccaaactctgaattagcgtaaattgttccggtgatacttcgtggtttacgtacatttcccaatttggaaatttgtctttccagtttttctggtatttttcgaaatctccttctttgtttgttgcccctaaaactttcgtttcaaaatcagttttgctatattttcttggtgcgtaacaagccaatattttttgttcgggtaaaatagtaccgtcattgcctttatccttattccttctaatgggcgtatagttatcaacgccatatttcaaaagaaacagttcatcaataaattcttcgaactcaaatccttctttggattgaatttgcattttaaaagcgttcttcaataatttatccatatacaaatcagagttccaaattaattttaactgtaccgtcaaatcccttttctactatctctttaagggtttgaagtttgatattattgccataatcagtttcaaccttagaaatgtaactccttttcttacccactttttgggctaattgttcttgagttagctgtctttgttctctggcttccttcagcatttctccaatatgtctgcctgatattttcatctcaaaaaggattaaaattgactttattacgaatgtacaaatgtaatttaaaagttgcattgaaccaactgtaaattgtataaaaagcatttgaaaatttccactctcgttctgaaaattcccaccaacaaagccactcacagccaaacacttcctttgactgccactttcttataacgcctctttttccacaagacatttgtcccgaaagctcgcaaggtgcgggataaaatgtaacaaataaatgtgtttcaattatggaaaaacagagaaaaaaagttttgctggcagccgtggcgatgctgtcaggaattggtgcgttcgcacagggaaacggttcggcaggtatcaacgaagctactcaaatggtaacaagctatttcgaccccgccacccaattaatctacgccatcggtgcggtggttgggctcatcggaggcgttaaggtgtataacaaattcagctccggcgaccctgacacgagcaagactgcggcaagctggtttggtgcgtgtatcttcctgattgttgccgctaccatcctgcgttcattcttcctgtaatcctttgcttatgaatagttacaatattaacaaaggcattgggcgtacagtagagttcaaaggattgaaagcgcaatacctgttcattttcgcaggcggactgctcggtacgcttattctcgtgatgatactgtatatggcaggcgtaaactcttacatctgcctgttcatcggagcagggggtgcttcgctcatcgtatggcagaccttttcactgaaccaaaagtacggcgaacacgggctgatgaaagtgggtgcaagaaaacggcatcctcgatacatcatctgccgcaagcctgtacacaggtatttaaaattcacttctaaaccaaaagccgtatgagaaatgtagcaaagacctccactttggaaagcaaatttccattgctggcagtagagaacaactgcatactttccaaagatgcggacattaccgcctgttttgaagtgcgtttaccggaactgttcacggtagcttctgcggaatatgaagccattcactccgcttggcacaaggcgattaagaccttacccgattttacggtcattcacaaacaggattggtacatcaaagaaagctacgcccccgatttggcacaggaagatcagagttttttatcgaaatcttatcaacgccatttcaacgagcgaccattcctgaaccactattgctacctgttcctgacaaaaaccaccaaagagcgtatgcgtatgcaaagcaacttcagttcgctttgcaaaggcacactcataccaaaggaaatcagggataaggaagcgatacatcgctttatggaagccgtagcacagtttgagcgtattgtgaacgatagcggttttgtgagcctgcaacgattgagcgaagaagacatcatcggtacaaatgaaaagcaaggattgctggaacagtattttaccctttcgagggaagcaggaacgccgatgcaggacatcgcactcggtgctgaagaagtccgtatcggaaacaaaaggttgtctttgcacaccctgtccgatacggacgatttgcccggaacggtatcggcagatacacgttttgaaaagctatctaccgaccgtagcgactgccgtttgtcgttcgctgcacctgtggggttgttgttgagctgcaaccatatctacaaccagtatttgtttttggataacagcgaagcgaacctgcaaaagtttgaaaaatcagcaaggaatatgcactcattggctcggtacagccgtgccaaccaaatcaacaaagagtggatagaaaagtacctgaacgaagcacattcgttcgggctttcctctgttcgtgcgcattttaatattatggcgtggtcggaagaccctgccgaactcaaacagctaaagaatgattgcggtagtgcgttagcactgatggagtgtaagccacgccacaacactacggatgttgccacgttgtattgggctggaatgccgggcaatgccggcgactttccggcagaggaaagtttttacacgttcatagagccagccttatgcttctttaccgaagaaaccaattaccacaattcgccgtccccattcggggtaaaaatggcggacaggcttacaggcaagcctatccatttggatatatcagatttgccaatgaagcgtggcattatcacgaaccggaacaaattcattcttggtccgtcaggttcgggtaaatcgttcttcacaaaccatatggtaaggcagtatttcgagcagggcgcacacgtactgttggtagatacgggtaattcctatcagggtttgtgcgaattgattaaggggaaaaccaaaggcgaagacggggtttattttacctataccgaagacaatcccattgcctttaaccctttttataccgatgacggcgtgttcgatattgaaaagcgtgaaagtatcaaaactttgatactaacgctttggaaaagggacgatgaaccgccgacccgttcggaagaagtggcattatccaatgccgttagcggttatatcgagcgtatcaaaacggaaaacgtgtacccatcatttaacggcttctacgagtatgtaaaaggcgattaccgcaaggtattggagcaaaagcaggtaagggaaaaagactttgacattgccaatttcctcaacgtattagagccttattacaaaggcggcgaatacgattacctgctgaactcaaacaagcagttagacctgctttccaaacgctttatcgtgtttgaaattgatgccatcaaagaccacaaaatcctctttcccatagtcacgattatcattatggaggtgttcatcaacaagatgcgccgactgaaaggtatccgtaagctcatcctgattgaagaggcttggaaagcgattgccaaagagggaatggcggaatacatcaagtacctctttaagaccgttcgcaaattcttcggagaagcgattgtcgtaacgcaagaggtcgatgatattatccagtcgcccattgtgaaagaaagtatcatcaacaactccgattgtaaaatcctcttagaccagcgcaagtatatgaataagtttgacgatatacaggcaatgctggggcttaccgataaggagaaagggcaggtactttctatcaatatgaacaacgacccatcaaggctttacaaagaagtctggattggtttaggtggtacgcactcggcagtctatgccaccgaagttagtttggaggaatacctcgcctataccaccgaagaaaccgaaaaaatggaagtaatgcagctcgctgctgaactggacggaaacgtggaactcgccattaagcatatcgctatgcaacggcgtgacaattcaaatcaatagtcattaacaatttaaaatttcaagaaaatgaaaaaaatcctttttatggtgtgtacggcactaatgcttgccgttgcaccgtccgcaaaagcccaatgggtagtaaccgaccccgcaaaccttgcatcgggcattctcaacagtgcgaatgaaatcgtacagacttcttccaccgtaagcaatgtggttaagaacttcaacgaagtgaagaaagtgtacgaacagggcaaggaatattacgacaagctgaaagccgtcaacaaccttgtgaaagatgcccgtaaggtgcagcaaacggttttgctggtaggcgatgtttcggaaatgtacgtgcagaatttcggcaagatgatgaacgaccccaatttctcgccgcaagagctgaccgctatcggtaacggctactccgcattgctcaatgaaagtaccgaactgctgaaagaactgaagcaaatcgtaacctcatccagcctttcgctgaatgataaagagcgtatggacatcatcgaccgtgtgtacaaagaggtaaaagactaccacagtcttgtgcgctattacaccaacaaaaatatttctgtaagctacctgagagcgaaaaagaaaaacgatgccaaaagggtgcttgacctatacggaactgctaaccaaaaatactggtaacaatggaatgggataatcttcacgaactcctgcgttcgctttatgacgatatgatgccgcttgcaggcgatatggcggcagtggctaaaggtcttgcgggattgggtgcattattctatgtggcattaaaggtttggcaggctttaagccgtgccgaacctattgatatgttcccattgttacgcccgtttgcattggggctttgcattatgtttttcccaaccattgtgttgggaaccattaatgcggtactaagccccgttgtaacgggaacgcactcgatactcgaagaccaggtgcttgacctgaacaagctgcaacagcagaaagaccaactggaatatgaagcaatggtcagaaatcccgaaaccgcctatatggtatcggacgaagagtttgacaagaagctggatgaattgggctggtcgccctccgacatcggaacgatggcagggatgtatatggacaggggtgcttatcaaatagaaaaagccataaaggattggtttcgcaatctactggagatactctttcaggcggcggctttggttattgataccataagaacatttttcctgatagtcctctccatactcggaccgattgcctttgcaatttccgtatgggacggctttcagtccacgctcacgcagtggctcacgaggtatgtgagcgtttacctgtggttgcctgtttccgatttgttcagttcgatgctggcaaggatacaatcgctgatactggaaaaggatatagcaatgctttcagacccgacctatatacccgacacctccaatacggtgtacatcatctttatgattatcggcatcatcgggtacttcactatcccgacagtaacaggctgggtaatccaagctggaggcgcaggaaactttacccgcaatgtaaactcaacagcaatgaaagcaggaaaccttgccggagccggagctggttcaacggttggaaacatcggcggtcagttacttaaaaaataatgtaaaacaataatcattcttaaaaatggaatttaaaacgctaagaaatatagaaaacagctttcggcagatacgtttatatgccatcgtgtttgccgttctctgcataggcgtagtaggatttgccgtgtggaaatcgtacagctttgcaaatgaacaaaggcaaaaaatctatgtgctggataatggcaaatcactgatgcttgccttgtcgcaggatgccagtattaaccgacctgtggaagcaagggaacacgtcaggagatttcacgaattgttcttcacgcttgcacccgataagaacgctattgaaagcaatatgagcagggcgttcaaccttgccgataaatcagctttcgactattacaaagacctgtctgaaaagggctattacagccgtatcatttcgggtaatgttcagcaacgaattgaggtagatagtgtggtgtgcaatttcgacaattacccctatgcagtgcgcacctatgccaaacagttcatcatccgttcgagcaacgtaacacgccgtaacctgattacttcctgctatctcgtcaactccgttcgttcggataacaacccgcagggatttaacatcgaaaagtttgcggtagtagaaaacaaagacatcgaagttatcgaacgctaaaaattaaggatatgaaacagttacttgatttagacgcattcgcaaaaacgctgaccgataaagggtatgacggttatttccaaacggaggcagcttatgccgacaaaatcaaagacagcatcagcaggtttttagaggcttgtaaaaatgggatggataaaccgatgttgcccaacattatgatgctgacaacttacctgcaatggaatggcgatgataagccaaaggttgaatgcaatatgtgggtaaagtatgaagacggtctttttgatgtacagaagatgaatattgaaaggatagaccaatacgggcaattattgaaacaatccaaactgacagacctctctacaagttcggttccgacaaggaaagaagccattgcccaagtgtccgataagcctaaagaacagttgtcttccccgaaaaggcggtttaaaatgcgataaccgaaaatccttaaagtatgaaaaaattaagagcaactatggacaggtattttgataagctcgatgagcgttggcgggctttgccagtgcgcaagcagcatcaatacacgttgtacttttttgtgggttatctcttgcttacggcaggggttattggcaaagtagtgtacgatacgggcaagccgaatgataccatcaacatcaggcatatcgagaaccctgtcctcaaaagtaaaaatcctgcaaggttgcaggatagtgtatcaacaattttaaaaaatcagttttatgaaagaaaatgaaaaaagggtcagcattctcgttgaggaaggcgaccaaagtaaagcatccaatctgctggatgataaaaagaacagcaaagaccgccttaaaaagcccttgatattcggtttgatggcgattgtcttcttaggctgtatgtacctcatctttaaaccgtcaaaggataaaaaagaggtcgaaaacatcgggctgaacgatgctgttccacaagctaccggggcaggaatgcccgacagcaaaggcaaagcgtatgagcaggaaatgctggaacaaaaagaccaggagaaacgcaatgcccttaccacgctatccgattattggaatgaggacagctcatctgccaacgccaagagcgaagaagattttgtagaagaggaagaaagcaacggctatggcagtggcagaaattcgggacgttatggcaatcctgccttgaacagctaccgaaatacacaaagcacgttaggctcattctataataacgacaatgcagaaacaatggaactccgcaggcaattggatgagctaaaagaaaaactggctgataaagatgtacctaaagcaacaacagtagatgaccagcttgccctgatggagaaatcctatcaaatggctgcaaaatatcttccgcaaggtaatagcagcaatggagaagccacacccacaaacggtacagcttcgggagcttcgactgccagccaaaaagagcattttgtatcatttacgcccacaaggaaaaacaccgtatcagccttgtatcgtgagccaacagacagcgaatttttgaacgatttaaaccagaccaaaaacaggggcttctataccgcaggttctactgaacaggtggtacagccgaaaaacagcatcaaagcctgcgtacacgatgcacaaaccgttgttggggaaacgggcgtaaggcttcgtttattagagcctgccaaaacgcctaatcgtaccattcccaaaggaactatcgtaacggcgaatgccaagtttcagggcggtcgtttacagctaaaggttacttcggtagaactggagggtaatatcattcccgtagatattaccatttacgatttggacgggcagcaaggcttgtacgttccgtattcgcccgaaatgaacgcacttaccgaaatggcgggcaatatgagccagacaggaggaacgagcgtgatgcttacgcagaatgccggacaacaggttgctgccgatttaagcagaggcattgtacaaggaatttcgggctatttcgcaaagaaagtacgtacaccaaaggttacgctcaaagcagggcatcaggtcttccttgtatcaaaacaataatgttaaactaaaataattttataatgaaaaatctttttaaaacactttgggcatttgctctgactatcggcttagccgtaaattcttttgcgcaggacagcatcagaactccgcttgcattgggcaagatagaaccatacaaaatggaagtaacctacgataaaacttcgcacttgattttcccgactgccattcgttacgtggatttgggaagcgaatacctgattgcaggtaaagccgaagatgcggaaaacgtactacgagtaaaagcatcggtaaggaactttgaaccggaaacgaatttttcagtaattaccaatgatggacgtttttacagtttcagtgtgtattacagttcctaccctgaagcaacaagctatgacctgctaacaatgcaaaaatcagtagatagaaccaacggaaacgatgtgctttttgaagaattgggcaacaattcgccctcactggcaggcttgttactggaaaccatttacaagaaagacaagcgcattgtaaagcatatcggggctaagagtttcggcattcagtttatcctcaaaggcatttacatacacaacggcaaatactatttccataccgaactgcgtaacaaaaccaatgttccgtttgagattgattttatcaatttcaaagtggtggataaaaaggttgccaaacgtaccgtagtgcaggaaattcctttgacaccgcttaggacttacaaaccattggacggcataaaaggaaaatctaccgagcaaaatgtattcctcttagaccaatttaccattgccgatgataagatacttctgattgagattttcgagaagaacggcggcaggcatcaaacattgcaggtggaaaattcggatttaatcaaggctcgtttgattgacgatatgcacctgaaattttaataacccatttaaaacaacagtaataaaatgaaaaagtatatctataccgtgatgctcgttttaatgggtatcacaacgacacaggcacagcgaatgctgccgaaacagaaagggttggaagtaaatgttggtgtgctgtccgatgataaaatcggcaacgattattatatcaatatcggtatgaccgtgaacggtaagaacggcaattaccagctttgggcgttggaatatacgcaccaataccacgattataaagacctccgcatcccgcaggaaacttttacagccgagggcggttacagcttcttccttttgggcgatgcccggaagaacatcacgctgaatgccggaataaccgccgtagcaggttatgaaagcatcaaccgtggcgaaccgatgttgtatgacggagcgaagatattggacgaggacaatttcatttacggagctggcggacgactgacctttgaaacgtacctttctgaccgatttgtattagtcctgcaagggcgtacaaaagtcttttggggtacggatttacgacagttccgaccgtcggcaggtgtgggattaaggtttaacttttaaaacgtaaaaaacgatgatagcaatattcaataaattcagaacagggctactgccattatatatattcctggcaatcctcacagcttcggttacgttggtatcttgcagcaaagatgatgaactcgaaatacagaacaattttcctttcgaggtcaatgtaatgccagtgcctaaagatgttgccaacggacaaaccgtagaaatacgcattaccatacagcgtacaggcaattacagcaacacgcagtattttcttcgctacttccagtttgatggtcagggaacgttgcaatactacaatgagccgccgtatcagcccaacgacctgtaccagttaccaacggagcagttcaggctgtattacacgtcaacgtctgccgtatcacaatcttttgatgtttggatttcggacagcttcgggaacgaaaagcagataacttttcagtttaacagcagcgattaagagcagtattccaattcataaataacggcttatctgatgggtaagccgtttttaattttaaattcgatagttgctaaagaaataatttcttatccttgcaataatgaaaaagggtattatcctttcggtttaccaaatttgagtaagttattatttccataaacaatgaaagcggcttgcctttttgggtaagccgttttcgcattttataaaactgctgattttacagactatggaaataaaaattagaaaggaagaaaaggaagatttcaaaaaagtttttgaactcattcgcctggcttttgaaaacgaggaattgagcgaccataaagaacagttcttggtggaacggttacgcaattctgatgcgtttgtcctcgaattatcacttattgccgaagtagataatcaaattgcgggatatatattgctcacaaaaattaatattgaagacaaggataaaaacacttacacctcgcttgcgttagcccctgttgctgtgttgccgaattatcagggaaaaggtattggcggcaaactcatacaagctgcccacgatatagcaaaaaaaatgggctttggctctgtgatgctgttaggacacgaaaactattaccctaagtttggctataagctgaccaaagaatttgggataaagctgccatttgaagttcctgaagaaaactgtatggcaatagaactatcgcaaaatgcgctgcaaaatgtaagcggtgtagttcggtatccgaaagagtttgaaattgaataatgccacggatatttttcgtaaattcaaacagtggaaataaagtatttttggtatggttgcatcattggtaataggtattatatttttggttgcaggactgggacttcgctactggattaaccggagaaagttttacaggcgcagccctatgggagcagagggcttctcatcttatgaaagttcggttttcattaaattcgtggaaagggtcggtaaatggatagcttacgggctgattattttcggtctgttgtcgctgtgggtttattggcgtgagaaaaaagaaaaacaacaacctgaagtaaaaatagaacaacctgccgaacgcagatagttattacagcatacattttttaagcaaatcggatagcccaaaagctatccgatttttttatttacggcttagtaaatcgccaaacgctacctctcaaagccaaaccctgcaactttccccaatgccgtactaagcctttataaattcaacttccatagcaaaattgagcaaacaatggaagtaatcgcaatacaaaaatccgcactggacggaatgaagaatgagctgaaagcacttttggaacttaccgaaaatgccacgcagaaatacacgccaatttttgcgcaagagcaatggctcgataaccaggaagtgtgtttgatgatgaacattaccaagcggactttgcagacgtataaggacaaagggttattgccttattccagactgaaccgtaaaaattattataaacgctcggatgtacaggctttgctcgaagccggacaaccgtacaatactgccgaaaatggatttattcacgaatgacaatgaagaaatcattgcccatcaggaaatgataacacagctaagaacccgtatcgaaagcatattgaaaaactaccgccctgtaatgaacggagaaatttacctttcgggcgaagatgtgtgcaagctgctccatatcagcaaacgcactttacagcagtaccgtgatgataatatactgccgtatatacaaataggcggtaagattatttataaggaaagcgatatcctgactatactggagcaaaattacatttcacaaaaaattgtttgactgtaatcttttttgtattatatgctgtcaaaaaaggacgagtttagtatctttgttgtcgaaaatatagaaaatacttaaagttgtttttgctttaagttccgcattagaaactggtaatttttaaaaccccggaacgaataagtaagaacgctcacgttatggcgtgggcgctcgcttatttgggggtcaggcgtaccagtgccttaatgccagtaagtgtggttgcctgcgcctcttttttttgcaggttccactaacttgataaacattaagagttatggacggcaaggatattttttaccccgaatttgaccaccctgctacgcaattatcagcgttctctctctgcattgatgtttttatcatatcccttaaaaacggggaaattgtacattttaaacctaacgagatagcacactttaaagattggcttgaccgttttaaagtcagggacattgaggtcgataaaggaataccttacgttactcgaactccgaatttatctaaagctcccaacggattttttaacctcatcaaactaagcaaaaagaaaatgagcaaagaacaaataataaaggtagggatgatagatgaccacgatatgcttagaaagggtatttgtgattttctaatgggtttcggttttgaaatactttttgaagccgagaatggaaaaatggcaatgaaaaaaatggaggaaatcgaagttgttcccgatgtaatggttgttgatataaatatgccggtaatgaatggttttgaaaccgctaaagcattgaatgaaaaatatccgcaaaccaaagtcctggcttttagcattaatgatgatgtacaggatgtagtaaagatgcttcagcgtggcgtaaaagggtatatactgaaaggcgcagaccccgaagaacttaaaaaagccataaccgttataaatgatggaggacattattttagtgctggcgtagccgaaattgcaaaagaatactataaacagtttccgcaataacaggtttctttgttactttcttttccgcagaactcacgaaagaaagtaatcccccaataataaattatgggataatgaatatcccaagcaataatgtcgcaacctgtttggtaaaatggaaaagaaaggatttgtgtaagggcgcattttgctaaaggggattgcaccaatttaaagcaaaaagactgcccaaccatcgggaggatctgtctttttgccgcccgacttttcgggtcaggcggctgctattttagcttatggtttttaaatactcgtcataacgttccgttatatccttgcctttcctgaacgtgtcttttgtgtagctgtaatgctcttcaaagaactttacttctttggtggtaaggtctattaaatagcggtagtctgcgtttatccgcctttcatccattgtacaatgctccgtaagcatttcgagttcttgctcactgttgtcaagggataacaaaggcaaaaaaagcctttcaacgatatatccctgttcgggtgcgctgctgctgtcggcaacgcaaataagagatttgccgttgctcaatttgatatgaagatttgaacgtgtcataaattgaaattggggtttattgattaagccgttaattggattaatgaaaattcttccgtccaaaattcctcgctggtgtgcttgccgtatgctgtatagtagcctgtaccgtttgcacgcaatacaagcctgtaacagtccaatcggttttcgggtgcggtaaacatttcctgctccccctcgtcaagctccacaaatgcccattctttatcgtttagcatttcttcaatgttcggggtatcgtcttcgcctgtgcaataaaaatctactgccgtatcatagtagttcattgagcagaaataatgattgccctctaacggcttaaccaatgcaagccgttttgcctgttcctgtttccattcttcggatagatggataattgcaaactcgcaattatcccattcgctattggtgttggctttaaccaaaatatgtgctgtcgctttatcggatagtttcatcgttctaaattttaatggtgtttaactgattttcgattttacgttctaatagagtgtcgagtatttcccattcgctgtcgtactccttgccctcaaaatggtaggtgtctgtttccttgtctaattcgtagctgtcaaaatcttcgtcttccagataaatatctatgagtagcttgtcagaaaacattgtcctgccatataccaaacaacctaattcctcataatccaattggaaatctatgttgtaatgctcggctatctgcttaactgcttccgcatttggcgaccattttgtttgataattgaatattcccgtatcgctttcgtaaacctcaaagaaatatccgccgttactgtcgtctatgaaatcgggcagttgtccgcaattctctttcctttctctttcagccattgatttgaatagctgtgttacctgttcgattgcttcaggcttcccctcgaagacaaccgtattgttgcaccaatttggcataattatttatcgtttaaggttatttttaataaaggctcacttccgaatattaggtgtatagcctgttttagattgggtttacagtcctctgtctgtgcatattcgataaggcagtgcatcgcaaatattgcgttgtatccgtcaaaaaaatggtctgcaaaccagcgtggttttttgagaagtttgtcctcgttcttctcgattatcctgtgtgcatcctgcacaagcctgtaccaaaattctgcggtaaaaaagcccttttgataccaaccctcacgaatggtaatttcatttttcagaaagtattcgcactgcttttttacggcgttctgaatgttcgccatttcttcggggaatagcctgcaaagcaattcgcctttatctaagttgtccattttatgtaatgctttcatattgttgttttatagtaggctaccaccatttaaggcggtagcctgttgttatctaattaaggtttaggatttccgcaccgtccaaagcaaatgcggtacacaattcaaatgctttctgtgatttgagttgggcagtaccacccaatacaatgctctgtaatttggcttcatcatctttgtaattgcgtacattctgaaagtagcctgtaacagcgttgtatgctccgaacaaagtccctttggtcgtgttcatctgttgtgcatcatctgtcatagcatatagaagcgcattatcaaccacgtttttgaacacggtggaaacttcatcgtcagcccctttgttgataaggtcaagtgtttctttgttcgggcaaagtgccaactggattagctttcttacttctcggtctgatacttttacctttgtccaattattgaaaatgccctctaattggttgctcaatgtgttggcaagccccataatcttgtgggcgttctcgatacgttgttttgctcccgaagtatgtttgatacggactacattggtcatactgcgtagtgaggcattcagcgtgttttggcatacgatacggataggcgtaaatgctgcggtaatacttccgctaccatcgtgcgaagtggttagaaaaatgtacttttccgttacatcatcgccattgcctacacggatataatcgggcagtttggcagtgataaagatgcgttcccctttgcccaatgcccctgcggtttcgtacaggataccttcgccaccacctacaatagcatcaaaaaaattaaaggcttcccgattttgtacaatgtggtaatccttaccgactacacccaatactgcattgttatcggtgcgtatgttagcgaaatagttaggtacttctaattcggtgctacctatttctataccgttggcagtttcgataatgcccgaacctttggtaaacagtggggattttacgacatcgtaatctaaccctgcgtatttgatagcttcctcgctcgttgggtattgctctacgatttgccccaaaccgtgccacgctttttgctgtactgaaaagaaactgtgctttcctgtttgctcgttgaaatgaatgttatgtgccattttgataaattttgatgttaaaaaatgattgaatactcgttgttagaatgggaggtcgtcatctgctccctgtgctgtaaccttgttgttctcggcttgtgcagtagcttgtatggtttcggctctcctgctacctccgtgcagtttgatttgtgaggtatgaaagttcagccccgaatgtgcttcgccgtctttgcctatccacgctcgtgtattcactcgccctgtgagttctaccaatgtgccttttgtcagcagtcttgccacgtttgcagatagccagtaggcacaatcgaagtaggtcgtttgctctacacgctcgccttgtttgttcttgtagctttcgttgctcgctaccgaaaagtttactacttgcttgtcgttgttaagggttcttacttccgcatcccttgttagtcgtccgatgatgttcataatcgttctgttttaaaagtttgacattttgttacgttcgcttttctcgcttcctgcttcctgttgtggtctgctccgcttcgcataatattttccaaaagaaaaaccggaaaaaagaaagcagataatccaagcgggcaacagcgatgaccaagaaaaaaaatgatttaatgggggttcctttagggggaaaccgttcattcgttttttttattggtgggtgtgtgcgatggctgcccgctataacttagctgcctttttaccggttgattgtggaaattttctattcctaatttttatgtcaattatgaacaggcttcaatagtctgaaacaaaggaggagtaataaaaaagtatgggcataaaaaaagcagaaccgttaagttctgcttcttgtggttagataaaagcggattagattgccatcataaatgcctcttccattgctttgaatttcggtgtaaccaaatccatatccttgctgattttttggcttgtgattttagcataaatttgtgtggtggaaatgtttttatgccccatcattttgctaaggctttcaagcggtacgccctcggtcagaaacattgttccaaaagtatgtcttgcggtgtgaaaggttactttttgctccgtgataatctctgccttttcaaccaatttacctatgtgcgtattgcaggttgcattggtaggaaccggaaagataaattcattccttgttgtaccctgatatttctcaatgatacgtttagggatttccattaaccgaacattggaagcaacatcagatttctttctccggctgataatccattgatgaccgtcaaagaatgattgaatattgcttcttgtcaatttcttaatatcagcgtaagccaatcctgtaaagcaactgaaaataaaaatatcttttacaagttcatatcttttatgcggaacctgacacatcatcagcttttcaacgtcttctttcagtatgtaccctctgtcggtttcttccatacttatttcgtaatcctcaaaaggattatcacgtatcagcccttttttgatagccagttcagccaaagcaataacaggcattgtgtaaatccaaaccgtgttatgggcgcattgcttatcgtagcggaggtaaaagtcaaactcacggataaaatctgccgtcagttcccgaaatgccatatcttccctgtgataacgctcttttataaattccgtaagatgattgtaaacagtgatgtatttgttgtaagttccttgtgaacgctcctctttatcaaccaatcttttaaattcaacattctggtcgttaaaaactttcaatatggcatcatccattacaccaacaccgagaaaagagagctttactttttgggcagttgcaaagccctcgtgcttcagcatatcttcataaatcttgtcgatacgtccccgtatattgtccagcttttggttgatgctcaaagctgtggcacttttgccctgaacccgtccgtgttttaaatcccaactattagggttaatttctaactttgtcccgaaagttttcggtgttccatcaatggtaatacgtgccataaccggggcattaccgttctttttcagttcgttctttttcaaatagaaaagcagtttgaacgtcgatttttttgtctgctccataactcaaatgtttaacgtttaaaattaaattacattgagttacaagggaatataaaaaagggtgcaaaagactgaaatataatcagttaagctatatagttgcctttatcaatcggtaacgaattagtaacctaaccttgtcaatttaagcccaaaacctatcagacaccgagttccaaactaagactacacatttataaagcattgtatagtagcggttttaatcgctttgcgtacttttgctttttattaatctttttatttaaaaaatcataaaaaaaccttccacaaatagaaggcttttaaaatttacatatcaataaatactgagttcaataggattatatctcttcgctttttctgaacttttctttattaataattgtcttgtttcctcatcgcctatatgttctaaatatttattaggattacccatttcttttcttttgtaatcaaaaattttttgtttctgtatggcttctgcttttgaattcatgtttgcggacttgcagagatattttctttttccaaatttatacaacgtaaaaacataatcttttttgtcatcgaaaacctctaaaatcaatcccggtaatttactgaatttgtaaggaccataaggaaaaggtatttcattcgtgaaatacgcagtccacgttctgccatattttttagccgtagctttttgacatttatattttccgatttttttatattcattttccaacttccaattcatatcattactttcttcatatttgtagttcttacctgaaatgggtacggtgacatatattttgcctaaggtaatgcctatattttcatcaaatggagtaaaatatcttaaatagtcattatagctacttttatcatttaattttctctcatattttaaagaatcactgacgtatttgtttaaatttttaaaatacgactcttccctgttcattaataaagcaaataccgcgtcctgagtaggtgcatttggtatattttggtctttataaactaatttataatctgcttcatattcaacattaaaaggcgtttgagatttgcttacaacagaaataaaaataaggcataaaaaaagtacttgtttcatcggtctattttaaaaggcaatccctattaacggactgccttatttattaatgtgagtaaattataatatgagatggccaaacatcacataaatcataattaatttgcgctaaataatttgctaattgttggttagtcattcctccggttcctataacttctactgttgttttcccacaagatggacggaatgggaaggcaaatacagttgatattcctaaaaataccataccaaacataagtgcttttttcataattgttttttttaattgttgataaaaatttcctttaaagttcttccggaaaactttcatacaaatctatatccctaactaataaaaaccaaatttaaattattcgaatttattcgcataattttatatttatgaaaaaattccgatggtgaaagaaaaattaatcaaggcaagaaaagaaagaaatttctctcaacaggatattgccgaacatcttaaaatcagccaaactcattatctccgtaaagaaaaaggtgaagttgagattaaagacgaagaatgaatgggaacgtatcgcaaaattactggacgtagaagtaggtgatattaaacaatctgataaagagaattcaattcatcaaaactttgaaaataattccggcaactatattggaagcaataatatatattgtaatgttccggaatacctgcttgaaaaccaacaggaatatatttccttactgaaaaaagaaattcaggagttaaaagatagaattgcaaagctggaacagaaataaaaaaaccttccatttccggaaggttttcactttatttttcttctaatttatgaactttcttcgttccttcatacatttcatactgcagaaatctggtttccagttttccgttgaaaagcttgatttttcttgacggacgaagaccgattttcttcaccgcttccagatcagaagaaatcagccatgccaatgtattcggataatgggttttgaaagtgtcgcctattttcttgtaaaaatcatcgtcattaatagaaattctttcgtcataaggcggattgaagaccatcaacaaagggaaaagttcttttttggaatcaaagaaattctgctttttcacttcaattacatcttccatttctgccgcttcgatgttcattcttgccgcattcagcattcttgcatcaatatcgtaaccaacgatctttccggtaaactctttcaccctgttgattctgaattctttaatcttggtaaaaagatccgcatcataatttttccagttctggaaagcaaatctccttctgaaaatctgcgcaggaagatccaaagcaatcattgccgcttcaattaaaagtgttccggaaccgcacatcggatcaaggaaattaccttttccgtcccaaccagccagttgaagcattccgcttgccagaacttcattaatcggagcttctccctgctctcttctgtatcctctcttaaataaaggatctcccgaagaatccaaagaaatcgtaatcaattctctgtcgatatgaaggtggaatttaatatccggatttttagtttctacattcggacgttttttgaatttttcctgaaaataatccacaatagcatctttcattttcagcgttacgaactgagaatgcttaaatgtttcagaatttacggtagaatcaattgcaaaagactgatccacatccataaattcttcccagttgaatttgaaaagcctgtcgtaaaactggtgctgattgaaagctttaaattcgtgaatcggaaccaaaattttcaaagccgttctcgcagagtaattgatcttgtataaaaagcctaaatctccttcacagtttaccgcacggtttttaacctcaacttttcttcctcctagctttttgatctgttccgccaggatttgttccagcccaaagaatgtttttatctgaatctgtatattctctatatccatactgcaaaaatagcaattttagtcgttggttgtcagattatagtttacagaaatcgctgcaactacaaaaaccatgggttcacaaaagcagacaatcgctcaaaaaacactatttttgcagtatggaatggtttgaatcttggtttgataccccttattatcatgtactgtacagcaacagagactatacagaagcggaaaattttattacaaaacttactgcagaactgcagcttcctccgaactcaaaaatcatcgatctggcttgtggtaagggaagacattcggtttttcttaataagcttgggtatgatgttttgggacttgatctttccagacagagtatagaattcgataagcagtttgagaatcagaccttgctttttgatgttcacgacatgagaaacccgattgatgcagatccaatggacgctgttttcaatctttttacaagcttcggatattttgataatgaaaatgacgacaaaaaagtttttcagtccgtttataatgcattaaaaccgggcggatattttgttctggattatctgaatgaagaatacgtaagaaaaagcattgttccggaatctaccatcattcgtggagatattgagtttaaaataaaaaagacaattgagggaagacatattgtaaaagacattcaatttgaagcagacggaaagccttatcacttcttcgaaaaagtaaaacttcatacgttggatgccatcaactcctacgcaactgaatgtggttttgagagagtaaaaatctggggagattaccaactgaacgattttaataaggatacttctccgcgttgcattaatttattcaagaaaaaataatgattaccgtacttttactggttttaagcgttattacaggagtatttctgggaaagcattttggtaaaaaagaaaaactggcaaaaaatctgttgattttaagtgccggatttctgattaccatttgtctgaatgaagtatttccgcaggtttatacctcagaaacaggaagcagtctgggtattttcgtgatcgccggagttttactgcaaatgattcttgaagctctaaccaaaggtttcgaacatgggcattttcatcatcacagcgaacataatattttgcctgttgctttaatggtgggactttttatccatgcttttattgagggaattcctttagcgaacgaagaacaggaattatcgacttatcttttgggaattgtttttcacaatcttccgatatcgtttattttgggcgcatttttatttaatcgaaaagatgaatcaaagtccaatccttcttatccttcgctgctcattgttgccctttttgctttggcttctccaatgggaatgctgctcggaaattatttcaatccagatcttcagccttactttctggcgatcgtaggaggaattttcctgcatatttcttcggtaattatttttgaaagcaataaaaaccataacatcgactggctgaaaatagggcttgtgattttaggggtttctttagctttggtcatgcatctttttcacagtcatgatcacgtaggacatcaccattaattaatttaattttacaaaataaaaaagctccgaacgtaaatgaggtcactgaaaaaccttgcatcttacgacagcctatttatttaggatgaaaaataagagcttattacaagatttaaaaatccgtaataagctttttattttattgggaagttgtttttttgatnnnnnnnnnnnnnnnnnnnnnnnnnnnnnnnnnnnnnnnnnnnnnnnnnnnnnnnnnnnnnnnnnnnnnnnnnnnnnnnnnnnnnnnnnnnnnnnnnnnngctgctgtattaacatctgctttactcttaaatgcagtgttaatatacaaagaaggagcgtaaaactatacgttttacactccttttttattggttaataaaaatttagtttttcagtgacctcacattatgatgggtatttttattttgattgctgcatacagatattatgcgagacttgccgggaaattcggaaaaacgaagtggcattacggacttttagccattgggatttatttaggaacgcagttggttttcggtttttcttatggtatttatgtaggaattactgatcccggctctttggatgattctaattttatggctttttcaggaattaatcttgtaagctggctgctttcagttgccgcagtatgtggagtttatatgtttctggaaggtaaatttataaaagaagcccgccaaaagccttctctggaaattgaagaaatcgggaaaaaagaattgtgatagataataatatacttgttaccaaattaattaaacaacataacaactataaaaatggagaacactatgttctccattttactatctaaataatgcttcggtatatttcttatttaccactttatctctcattgaagctttatctgtgaaatttctggaaatatttcttatcatttcactgtaattatcagttccatcatcttttttacgataatatggttttattgagctgcaatttttatgttcaaataatgtattcaataaagttctatctgaaatgccacatgaatgaccaaatataaatacttgatagttatttgaatttataaattctaacaatcttttataagaatcactttcaagatatttcattgacttaatattctgcaagtattcattattattaagattttcaatttccaaatgatctttatcaatttcatctccaaaaccaaaaattactttattgtctgttttgttatttagcacaccatgaatatgaataacatctgtagatatctttttaacaaattcattatcagttggtgaatcatcataatgcatttcagttggtgtataattaaagtttacaaataatatttcatctggtcgatgacgaaaataatttggtgctgcatcagaaattaataactttttaattttttgtctcttatctttaatattaattaaagctttgtaaagtcgagtttctctctcggataattctaaatctgaaaacgatatcttgtcatcttcaatatttctaatataattagtgactctttgaaattcaatttcagcaagttgattgatagaagattctgaaaaatctttaaaattaaagtctgaatatattacattataaacagatcttttgaaactcatttcctctgcagtactagggaaacttgtagaaaattctttttgtacttttgtgagatactcttctaacaataattcgatattagcaaattcttcatttagttttgttattgtatatcgagatggctttttataacagtttttcaataaaaaatagtaatcattctctatatctacccaattttgtgaagatttatttctattgagaatttcaaaaaactcatttttaaagttgatattagtatgaatgtaatttaagttatcgattaatgctagataattattatcaccttcccagcttcgtggaataggttgtacataaaattcattattttcaaagccatcttcccaataaggttttttcctaattttttcaattgcagtttgccaataatcatctataaaattcccatagcttgttttcatcccatgagctagatcaaaaccattgccaattaatattatacgattcataagtattagtttcttatttgaatagtaaatatattaatttgtaaataagctttaatttatttttagatattttacttgtaattttattgttattacgggtttccgtaatttaaattgtcaaagatttcattagtttgaacaaaaatttttagttatatgcaatctttaaaagaacgttttcaagaattacttggtgaaatatcaattgaaaggacatatcatttatcttatgatgttgttaacaatgaaaagaaatttgtaaatccaaataataatgaagaaaaagatgatgcaagaacatatattcttagaaaacttaaaaagtttaaagctaaatccatagaaagtccttgtgcatcaacaatcatatttatttttgaagatgagaattttgatctaattaggtttaaaaatgaattggaaaaagatttttatatttttatttcgttaattgatgacaggtataaaaaccgtaatgaagcatttaactataataatgatttagacaaaagtgcgcaaagtatatggaaatcattacagtaaaaactacattctacccaccaaacatatgaaaatgttttaaattttttggatagagcgtaaaacgaaaatcatggacgaaatcgaaagacttgcctttgcattaaagtattttgcggaaattgaagaggatgattttcggccacaatttgtagtttgcctcgtcggacattcacatttgcttccctgaatatgggtttgcgttgtcggaagttcatttttgcctgccccaaaaatggtttgccctgtcggacattcacatttgctttcctgaatatgggtttgccccgtcggaacttccgacgataagaacctgtaaaatcttgccgccggagatctccgatggatccatgtttttttctttgcttagttttaaattgagcattcttattgtttttcatctataccataaataacacctatctgaatttttcatgagtatttcacaaacttgtaaaggcagacaaatttgaaagtcttatttttgcatagaattttatataattcttttcttcaattcgtacaatgaaaaaacaagatacctggggaattgtaaagaggctgttctttatcggaatgaagttccgttcttggttcatccttactttagtgatttccatttttctggcaatagtttctacttaccgtccttatcttaccatggaagtggtggataatgatattaccaagctgaaagataaagcgctgatgctaaagcatatttatcttttggtcggtctggttttcacagaaaccattttaaacttttttctggtttacttctccaatttcatttctcagaatgtaatccgagacataagagagaggctgtataataagctgatttattttaaaacgtctttcttcgataaaactccgatcgggcagttggtgacgagggcggttggtgatgtggaaaccattgcaacggtgtatacggatggttttttaatggttttcggggatgtgctgagaattatttttgtactggtgatgatgttcagtaccaatgttcatctcagttatattacactggctattttacctttaatggtggtgattacaagattcttccagaaaaggctgaaaaaggcattcggagacgaaagaaactggacttccaaccaaaattcctttgttcaggaaaggttggcgggaatgccgatcattcaggttttcaacaggcaggaagcggaatttaaaaagtttgatgatatcaatattactctaaaaagtgctttgctgagaacggtttttatcttttcgctgttttttcctgtggtggaattaatttcttctcttttcatcgggtttatccttttttacggaggatatattacaatcagtgcgggagttgtgattgcatttatccagtatatttcgatgctgatccgtcctttacgacagattgccgaccgtttcaacaacattcagcgaggaatcgtaggcgcagaaagagttttaggattaatggatgaagacaatgccatgccgaacaacggaaaagtggaaaaagatcattttgacggaaaaattgaatttaaagatgtacattttgcgtatgacgaaaagcaggaagtattaaaggggattgattttaaagtaaatccgggtgaaactgtggcgatcgtaggtgcaaccggagccggaaaatctacgatcatcagtttaattacaagattgtatgatattaattccggaaatattttaattgatgatgtggatctgaaagattatgagctttataatttaagaagccacatcggagttgttttgcaggatgttttcctgttccacggaagtatttatgaaaatctttcgtttggggatgaaagcattacgctggataaaataaaagcaggggcaaaagaaattgaagttgatgaatttatcgaacagcttccgggaggatatgattatgtggtaagcgagagaggttcgtccatttctcttgggcagagacaattgctgtcgttcttaagagcctatctgtctgatccaaagattctgattttagatgaagccacctcttccatcgatcacgaaagtgaaaaactgattcagagagccacggaaaaaattacaaaaaacagaacgtcaatcattattgcacaccgactttcaaccattgaaaaagctgataaaattatcgtcatggagcatggaaaaattgttgaagaaggcaagcatctcgaacttctggacaaaaacggatattactccaccctttacaaagctcagttgagacatgaagtggaactggaagaagaaactaaaaattaaatttatgatctatagaaaaggttaaaatcgattggttttaacctttttttatttgatttcgtattctttctgtaaaattttcaaaaattcatccttggaaattcctttttcggatttgaaatgaatattcatcaggccttcatccgttgtaaatttatcttttccgtaaagatgatccaataaactctgaagtgaatattgtctggtttcaatgctgtatattctgtcatcaactattttcgtttcagatgagacaggctcattgtcatttataaaagctttctgctcaattcttatatcgtaatcctgtgttttttcagcaaaaggagacgtaaaaagcaatatgatgcaaggaatagaaattccgagcagaagattccataacgcatgataaagcatgctgtaaaaaatattcagtcttacacgaatgtagcttaaaataagtccacccgacaattgagaagccacaatgaagggagacaatgcataaaaagtccacgaatcattcacataattatccaaatgcaccaatccgaagatgattgaagaaatatagactaaaaacggaaaaattctgtcccatttttccctgctgataaagtttgaaaaaagctttttgtaacgaagagcgtatctgaaaataaattcttcagaaagcggagcaaaaattaccattaaaaagaccgcctgaaaccatgttagattttcaaaagcatcggatggttttaaagtgataaatttttccgcgagatagtttagaggaagcactaaaaccaaaaagaaaataatctcaataatcagcagattggaaataaagtgaaattttctttttgaagaaaattcaatctgaacgtcatctggcttttttataaactgtaaaagatctttgatatcacgtttcaatctttgtaaataattcacgaagtaatttttaaaacacgaaattaaaattttaacgttgatgaaagttcattttttgtgaaatttaccagcattcatattttttcagaagtttttggataataaaatcaggattttttcatcttgaagattttgctgaatcgaagcacaaatcgggagttcttgaattcaggtttctctgtatggaaaaaaattaaacagtgataaaaatacttctgaaaaagcgattttaagcgcaatctgtggaatttttcaaattatttatttaaacgttaaatgtgttaaaaatgtatacattttgtaaaataaattcgattgtcgtaaatattttagtaaaatattgcctgaatcttatgtttataaggaatattttattaactttattcagaatttaaacacaacccctttattttggtagggtgtttgatgtaaagaggtaattttaattaaatccaaaaatatagatgaagaatatacaagatgaatttcaggtttttaaagacgaattaagaaagttgaatatcgaagtacagaaagtggtgaaagtagggaacggcagtatggatttccacgaagttttttataaatcgccaaggtatgaagatgtgaagagcgtttatgttcagaggcataatctggacaatattttagagaaatttaagcaggcttatcattaaatagaaatcgcggctcagggaacctgagccgcgatttttttattatcaattaatccttatccaatgttgaggtttttctggtgtccttcattctgatgtatactacaaaagaaaagaaaatacaggctgtaatataccagtaaaaatagtgctccacatctgcctgtttaaaccagagggcaatatattctgcagttcctccgaaaacggcaaccgttaaagcataaggcaggccaactcctaaagcccttacttcggaagggaaaagttcagcttttacaaccacattaatggatgtatagccgctcacgataattaaagcagacatgatcaggaaaaatgcactccacattgatgtagtgtggcttaaagcattcagaagagggtaggtaaaaacagttcccagaattccgaatgccaataataaaggtcttcttccaatcttatccgacaaagctccgaaaacaggctgtaagcaagcaaaaataaagagagagataaaagaaaccagtgtggattcttctttggtaagatgaacggtatttaccagaaatttctgcatataggttgtgtaggtgtagaaagccagtgttcctcccagtgttaatcctacaaccgtaattaatgcttttggatgtttaagcagttcctttaaagttccttttttcttttcaccaagatcttttttattctcaaaagcttcggtttcatgaagattggctcttaaatataaagcgataacagaaagcaaggctccgattacaaaaggaattctccatccccaatcttcgagttgggcttccgttaaaagtaatttctgcaaaatgagctgaattcccagtgcaattaactgtccgccaattaaagttacatactgaaagctggaataaaatcctctccggtctgaagttgccatttcgctgaggtaggttgccgaaacgccatattctccgccaacactcagtccctgcaataatcttgcgatcagcaaaagaagaggagctaaaacaccgatggttttataagtgggcgttaaagcaatgagtaaagatccgaaagacatcagcaaaacggagagcgtcattgctttttttcttccgactctgtcggcaatacttccgaaaagccatcctccgacaggtcgcatcagaaaaccaacggcgaaaattccggctgtgtttaaaagctgcgccgtcatatccgaatccggaaaaaaagaatttgaaaaataaatggcaaaagcagcgtaagcataccagtcgtaccattctaccagatttccgatcgatccgcctacaattgctttgattctttgggcggtggtgatttgtgatgaattcatgcaggaaagatatttcttttctttaattgtgaaaagtattttagatttaatttatctgaaaattgtatacaaaaactgacttccccatatttaatgaaatacctgtatcctaaaacaaactgaatagcatagtgaatagaaacgtgagatgaatacatgcggtgttgattttagactaatataaaaaaataaaaccgctctccggaaagaacggtttaaaatagttaaataaaattttttaaaatcgatatcccagagacaatccgcttctgaagccaagccatggtccgtctacatttactttagcgccgtttccattggtttctacggtgtaatttacataaggaatatccagatcttcaatttctttttttagctgagcctgcatatcgggagtgaggattacatcactcgtcatggtaaaatcgccctgtccttttccgtaatgcgctcccgcgatccagaaatccagaactaaatttttgcttggcgtaaggaaaaactgtactcccaccattacaccgccactgtttccgtgtgcgcttccgtttcctttcagaggaatctgataggtcgttccgctgaacgtgtaatcataataaaaatcgaaggtgttggaagtaattttggaatatctgtaataaggggctacgtaaaatccttttccgtaaccggctccgagataaaatcgcggttcgatggtaaagttgaacgattttacttcgagattctgaaatcttttttcgtcttcatcactcagaaatgaattgatgaaaggaactttcccttcaggcatggttccgaatcccatatttaaagaaaaccatttattaaaagctctttcgtatgatagattgatgtttctgaaaacatatgcggtaacattcgtcttgataatgttcattttatctgaggtttcgggaactgtcattttaatgacatcctttttagtcggagtttcaggagctatagtttcctgtgcagaaaatcctgaaaagataaaagaggaaagaaggaagaattattttttcatgatcttatatttagtaggtgataattttcaaagagcaaaaaacgggcaaaaaaaataaaaaatacacttttgcgtgaaaaattaaaattatgttaataatttatcttattttgaaatgttttttttaaatttaaaagaaaccgtcagtaatatgaatgtaatttctttaataaagtaatgctgttttttaatgtactttaatctgagattattatacagataaaaacctcttgttttcacaagaggtcgatgaacataaaaaaaataaaaagtaatttctacttaatatagtcaaacattatacgaacttacagattatctataaagattatgtttcaaaaattttttcattcgtgtatgtggagaattaaactagcttaacgttaactgcgtttaatcctttctcgcttttttgtacttcaaaactcactttatcgttttcacgaatttctcttgtgcttaatcctgaagaatgtacaaaaatgtcttttcctccgtctgcaggagaaataaatccgaagccttttgcttcgttaaaaaattttactgtgccttgttgcatggtaatgggtattaaaattatggtattataaatctgtcgacttcacagattctacttgaaatcgctctgataatcgggtggctgaaaaagtaaactgaaagaaaaattgtgatcttaaactattacagaataacgaaggcagaaacctgttttattgatgcttttgcaaagataggataaaataaatgaatactgtttaatttaataggttgattaataaaattttattcatatctttcacgcccaacagaattgtttgcataatgccaatgattttaatctaattcttatgcaaaaatattcagatgcaattctggcaaatccacagaaatctccttccggatctttaaagcaggtaagaattgcctattttattatgcttcatcataaaccggaggtctttaaagagatgtttgaaaagatttatacaagagatcagttctatcttatccacatagaccggaaagcaaaagcagatttaacggaagaaatacagaattatctcgtgcggtttcccaatgtttatattttggaaagtgtaaacatcgtttccggcggtttcagcatgatccagacagaactgaatgcaatggaatatcttcttaatgcaagtatagagtgggattatttcattaatctaagcggtgaagattctcctttaaaatcgcaacagattatccgccagtttcttactgttaataaaggcaggaactatattttctattacgaccagaagttttacagaccggatacgctaaaaagaatacagaatcattttaccgaacttacccacaaaatttcttcttatgtttacagaagagaatttatgaagggggttgtaccttacattggaggaaaatggtttatgtttacaaggaaaacctgcgttttcttaaccaataataaaaaggttatggattttgaggattattatcttcatacgcttcttccggcagaatcattctttcagacggtcttaatgaatacagactttacggatattattgtgaatgatgacaaaagagccgttatcgatcatccttttttcggcaaagatcttcacaccgatcattttatagaatctctaaagtccggaaatcacctattcatcaggaaaatgaataagcagactcaccagaatcttctcgattatattgaagaaagttatcttcttccactcacagaagtaaatgaaattgaaagagaattaaaaaagcatgaccgtcagaataattaataattttcttctatctaaaattgataaacaaaggcattaatgttcattcctgcgcctacagaggcaaacaaaacaatatctcctttctggatttcgtgattttcaagctctccttttaggatcatcgtaagcaaagatgggatggttgccacgctgctgtttccaagtttctgtattaccataggcatgatgttttcgggcatttttaatccgtacaatttgtaaaatctttccacaatggcttcgtccattttttcattcgcctgatggatgatgattttattcacctgatggatgctgtatttgctttcatcaagacattttttcatggcatccggaacatgcacaagcgcaaattcatagatttttctgccttccatttttatatattttgtgtcctgacaggcttcattgttgtaagatttaccaaaaaataaatagtctttttccttaagtgtataagacgccgaaagatgagactgtataccggaattgtcctgatcgttatattccagcacaactgcacctgctccgtctgcatagatcatgctgtctctgtcatggatatcaacaactcttgatagtgtttctgctcctataatcatgcatcttttggcaataccggctttaatgaaagcatttgcctgaataactccttcaatccatccgggacatccgaataacacgtcatacgcaacacaaaagttattctcaattttcagaagatgctttactcgtgcagcaagacttggaaccatgtccgattgtacggttccaaagcggacatcaccaaaattatgggcaaaaataatatagtctaatgtttcaggatctattccggaatcttctatggctgcttttgcagcaattaagccaaggtcagaagttacctgatctcttgatgcatatcttctctcctcaatacctgtaattttctttaatttttcggtaagcgaggcattgtcgtctttcaggataattccctgatcatcaagaaaaatatgatcgttaaaaaataaattatcaattgtttcagaaggaatgcagttgccgattccaataattttaccagtcatgtgaaaactttattttggatctataaacaaaatatttcatactttttatctttcttatcattgtaaatgaataaaacaattaattttactgttagtacagatggcttttttctgatgaatacagcttaataaaaactttttatttaaaagcggtaatattattattttctagacgaatttctaactctaaaggtagcagattaaaaatgaaaaataccatattggaagtgctttatttataaatttatatgagttgcatcatactattttttgcgaaccgtgtaatgtacagataagtttttttgataattcaaatctcagaacagattaattgtaaagcttaatcatctaaaagcttactgtataacggattgataataaattaattcagcccgaaaaaatcgggctgaattttatttaacaggaaaactctttattttttttgattgtccgtttattaatctaaagctttgataggctcagcttgacatcgctagaaatcaagcgtttagtattagaggtgtcacactgagcttgtcgaagtgcctgttataaataattgattttcatattagtgcagagtaataggttgtttaaattcaaattattttttgataaattttgtcgtctccggtttattttctttgcctgaaacctcaatgaaataagatgccggcggaagatcagaaacctgtatttttccggatcccagatctgatgttttaacgagtttaccatccagactgtaaatttttgcctgagtgtaattttggatatttcctttaatattgataaaatcgtaaacgggattcggataaatttccaatctctgcttttgggcagaccaatctccggctgctaaaactgttgtgtttaaagcctgtgccgaattcgttgtctggttattaattcccgctaccggaatgtttaccacagtttcattggtagtgaggagcggaaatttatatgaacttccataataggagtaagaagtatttacaatagttcctatcggaaataagaaagaggtgtcgttaggaagataaaggttgaaattctgtacagattttacccttaaaacattggtaaatgtagaagatgccaaaagcagatttccccacgcatcggcggtaagggttattgttcctttgcaaaggccgtttgcagaagtggaggtgaatgttccctgtgcctgatctgtctcgctgtatccgtaagcggcaggataggagataaatgtaccgttgttagatgataaattaagcgtggcatccgtggttacaaggcctgtaatttcaagtttggaagccgactgtttgtagtatacggtgttggaacttccggtgagcttgagagtggatccgggaaatgttgaaatttcagaagcagaaggagtagagtaattttcgggtgcggaaccgcttaataccaacgaagaattgttaaacgtaatgtttgctcctgttccggaattgttgggagttccggtagcaagaagataattgggattatctccggaaacaggatcgttaaaggttttggtaacggtagtctgcgcgttgcacactccataaaatgacaacatcaatagtaaaatttttttcattttcgattttttactaaagataatcaaaaagttacgttcagaatgtattttttattttaaaatttttcgatgtttaaaaatcatattattcagaaattggatgtatctatcccaattgatctcatatattctgaaggtgttttattttcaatctgcttaaaggctctgttaaatgtagactggtgcttaaagcctgcagaaatatagatatgcattaaagtatattttggataatttactttcatttcatccttaatataattgatacggtatgtgttgatgaggtttttaaagttagtacctgcattttggcttattgccttggaaagataagttgtattgatcccaaattcatgcgcaagatcctgaatgctgaaattagaatttttccatggggtttcagattccaaatattttataatgcgatcatatatttcggtatacatctgcagattttcttcgtcagtctcctttattgtttgttcttcagtcgtcgcataatcttcttcacttacaggtttctgctctttattctgatgccttttttcggaaattttcatattataaaatatcagaaacaatgacatcggaatgaatgtcatcagaacttttatttttccaatctgcgtgtttttgtaaacaataatatccgggaagtaagatgacggaaggtttatcaggataatagtaagaagtgttataacagctactgcccaaagaagtgttcggaaactataaagattatatagtcccagaggaagcagtgcaaaaaataatatagtttcgggagtaagcttccaaaatacaaaaagtaaaaccaatagagaagttatttttacgaccagataataatccagaaaatgtttcagaatattatattccaaccgataattaactgtggttaccaagattaacagcaaaacagcacctgaaaaaaatatcgcaatactgtcgtttccttcaaaataaaaaatgagtgtgtgaataaatataataaccattaacagaagattgtaatggaaaaaaaacatcttaattaagtgttcccacgaagctctgtctggttttgaattcgggtaaaaattagtttccatatgataattgtgtttgtttgaaaacttttctttttccttattcgagagtgtgaaaagtttatggctaagataataattattagaatacaataagtctaataagttaatttctaaaataggttatttaatgtgttggttaatagtgttttattttactttgagccaaattgtaaaacgttaaaatttttatcaatcagtttacttgggaatctatatttgtattatcaaaatgcgattaaaatctcttaaaatataatataaacaataataagttgggatagaaataatggttttgaaaataacaattagtgataacacaataaagaagataaaaaattatgaattatgtctttcaatgtaaaaaaaatccatattggaaaacttctccatgagaaggtaaatgaaaaaggattagatatgtatcggatagaaaagtttctgaattgcaatgaaatggaaattctttctatgtatgaaaagccaagtattgatacggaaattcttttaagatggagcaagctgcttaaatatgattttttcagaatctacgtacagcatattattctttttgcaccttctgagaaaagcggaagcgagatacagggaaagcagaaactgccttcttacagaaagaatgtgtataccaaagagattataaattttgttctggaacttctcaataaaggtgtaaaaaccaaagcagaaattatagaagaatatagaattcctaagacaacactttacaaatggatagaaaaatacaacagtcggaattcagaataaatgctccggattaccgtaagatttataccgatatgattgaaatgaaatgtccggatacaaaaagacaatgtgaagcagtacttaataaatcaagactcacggtgatggatatttttgaaatcgaaaaaataatttttgcgcctaatgatcttcagaatgaaaaagagaacggaaaattccgggcatacgatagtgaatctattttgcagattctgaactatcagaaaaagaataaaatgagtaatacagagatttcaaatcattttaaaataagcagaaattctttagcgaaatggaaaaaactattttcggaaatctgaatttaccgttgaaattttcgatcataatatttattcttaattaatttcaaaaaaacaatatttaataacaaacaaaatgaaaaaattatttacagctttttttacagcgtatgtgttctcttcaattttatatgggcaagttggtattaatacttcttctcctgaagcaagcctcgacgttcgtgcaaaaaatcattcaggatcttctcccggagccgtcacttcaggagacggaattctggtaccaagagttaacgctctttccgtaaacgggtctgtaaacggacaattggtgtatcttaccgcagatgcaggaggttttttaaaaggatttcattactggaacggaaccgcctggaccgctttggatgtcacaaatgatgcatggactaatgattctgccggaagtatgataaaaatcgggacgaaatccgacggctctgcgagaagcagcaatacagattttgttgcaactgatgcaggaagagtagggataggaacaaatgatccgaaagttacggtacagattgaaggacaggctgcttcttccggggttcctgacggatttacgcctccgagattaacaagagcgcagctttctgcgaaagatgcgtcttacggaaacaatcagaacggaactcttgtttttgtaacatctctggacggatctgccataaacaaagtgtctaacgttacttctgtggggctttatttttatgatgctcctaccagcaagtggtataatatccgaaattcatcttccggagtggtggaaggttttaaaattattacaggaacatattctcctacaactccttacgttatacaaccggacgattatattttgattttaagatacagcacagcttctacaggtgggaatgcttctgcgaatgtaagtactgtaagtccctatattaacagcacagcaaatctgcagcttcccgatcctacaacgtgtcccggaagagttttacactttattaatgacagcgacaaagtaggattgacaacagcagaaaatgtttataccaattatgctatgcattctgcattatcggatgccaacagtttcaattcaagaagttctttaatgaattatgaaataggaactggacaaaattattctcagtggaggatcataagcgacggtacacgctggatttgtctgcaggttattgtggtgtaacacaaatgtttattataattataaggaaagaggctgttgtaatgacagccatctttttatgtatgaagttgttaaaaactttattttaaatttaatattaattgataattgccacacgatacagcaataactcattttgtgataatattttgtatccaaaaccgatttccttccaaatagcaattaatttttctttcgctttactgtcgtctgaaactacgatgatgtgttcttcatatttcaattcacgtctgaaaataagatcatattctttgtctattcttctggctcctcttaaaattgaaaggagatcaacatcatcagaattaacgtaattcctacgaaggatatttgatttgattttttcaatcagtgaattggtgtacgctgtatcttccggtagattttcaaataacttcattacgtaatcatgatcatgtgttctttcttttctttcctccgtttcaaaaagtttgcagatttcctcgctgaaccattctcctgaacccataactcgatattccttagtagttttatcatacactaaaggaccggaaccaataatgtgacctctttcatcatccggatcatatattttatgtgtccagaaaaatatgatcatttcttccgtatcaaagtattcggcaattttaaaatcggggcttatttccttttcaatgatttgttgagcaaaatccaggtcgatcatattgccgtaatcattttattaatctcggcattaattctctccacaatccacgcttgatcatcggaagacagatcatttaaaagaccgtcattattttctttaaaatctgtgatgacatcttccagaaattcctttttaatttcggaaactcttgaatgattatttaaatctaaagttccgattttagaaacggcacttttcagcctgttttgagtgacgtagtttctcagttcgtctacaataaaggagagttcctctgttttggaagaaacgtttggaatgaaagaccatttttcagcttcatgaaacttttcttcctcatcaaattcaggatttttcaatttgataattggtctttgaaaatcattgttatccaattgattaaaaggctttatcacgacgccttcaattaaattatcgttcagttccggaagattaaattctttgggaacagcagaattgatcctgatattgaaattcatcgcttcattaaattttcctatcagcaaaggttttgcataaaatattttaaattcatcaaaataagcaacagcactttcataatccagataagatttggaagcagtaccatcggtttcaatagcaatatcaaaagcacaaaattcgatgtcgggcgtataatatactcctgtttgtatggcatgaatatcttttacaggggcaacttcgggatgaggatatttccctccgaaaagttctccgtagatgatatattttgcggcagtaatgtcgctgctcagtttttcaaaaagacggagaatattattttccagcttactgaccacgagctgaaagccgaaaaaatcgtcggtccagttgaggtattcttttcttttggcaaatttaagactgccgttttcataaacaaagctgaaattagcgccgtgtactttttccgtaacgacccatttcagtttttccatcttggaaaaatcgctttcgctaagacctaatttttttaagttgttgggcattttttcataccccgaaaattcactcattgttttatcttataagaagtttcttagttttgtagaattaacctttttttttactcgtaaattctacccatttccaaaagattacccaaagttcgccaacttacttcaaactcttcattattactttcgtcatcgccatgatctaagtaacatctcataccacattccaaaatagaatccggatcaaaattgtaccatcggttgcctgtttcagaatcgattccaaaataacgccattcatcttccaactgttttcctttcattttgtgcagctctgcaatctgaaactttatgacggcaattgtataatcatattcgccactggttgaagtacttgtctttggattgatgaatgttttttcgtcaggtgcttttataatctttaaccattcagtaccaaattttttcggctccgaagtaaatgcattcattagaagtttcgataataaatcggctgtcaaaggttgttttcttatctgttccacaagctccagtaaagctagaagatatgtttctaaatctcttttttctatattgttgtttcgattgatgcaattgtaaaattcattatacgtcatatataataaaatgtatttataataaaagcaggctaatccataaaaatatctaaataatcctgtagaatagcatcattgcctcttatctcaattgtgagttctttaattttttggatcagttcagattcgtttgtgttttcatcaatatctaccagtcgcaatgcaatttgcgattcgtcatctttcagattgatttttattgatcttccgtcaagaatggttattctcgtgggtacagatggttttctgtaacactcttttataagatttacgatttcaaaaagcttttcagtttcctcaatttttccactccaaactctgccatcttcttggaaatattgcgatttggataaaataactaaaaggatataaaaatcttcgtttttcttgatttcaatatcaaattgcccatcaagagtatgtatttcaatcttgatcatttgtttttataagcttcaattttttcggataatcttttggctaaataatcattaccatcttttaaatgttcgtaaataatttttgcttcctcaagatatttttctttcttcgcttctttccaaaaatagggtggagcatataaattgcagattctgtctgccattttaaccgcccagacttctttgggctgttgctttattcggtgtaagctatccttcatttggtgttccttttcaagctctgtattttttgtgagggcaagaacaccttctttcacgtctttaccatattctttttcgagatcttcgattgggtaatctgtatcttctatggtatcgtgcaaaaacgcacatttgatggctagatcaaaattaaaatcaggagtatttttagaagcattgatgatttcaaataccacgcttccgatgtggttgatgtactctattttttggtttttgttttgtccgccgtacgtttgtccgttgtgcagaatgcttactttctgccatatgtcctgtaaatcgtctattgtaaaattgttgttcattttttgtgattgtttgtatgtagattttatttagatagagctgatttttccaattaaattttactctataaccagtttcacataagtaattccgtcttctccgatatattcggaattataaactctctttccgataattgattgaatagcgttctgaacatctgctaattctcctgctaattcaagactgatattttttgagctgtaaaaagcatcttcatcaataaaatcagaaacgtgcaggtagaatttatccagtatatcttcaagcgggtactgagaatcttcctcttcttccagatcaaaatttactgcaaaaacatagatgtcctcttctgtatttttatagattttatcttcagctatttcatatttagaattactgtgtttatccagatcaattagttgtatgtttttcattttaataaggtttttatttaagcaactccctcaagaatttttccgaagaacttttctctggcttcatcgagattcatatttgcatttttaatgctccacgcagtttcaaacaaatcgaatacatgagacattgcgagagatcgggcaggatctccgggaaaacagaaaaaatgagcttcttcagaaagacttctgcctttcccattttcctctaaagttacccagacagaagattttgcatctgctccggaacctccaaattctttttccaggttccagtgtatattgtctgttgctccaaccaaaatcatgtgatgatctatctcaatccagttgataataagatgggtgagctgttcttccattttgtatagtattttagtctggttactgagatttccagttaaattttgtcattttatttgtcaacttctgatcaacaacttcaatgcttaattcttctttttcttttgtgagaattatcatacagcctttttccaaaattccactttcgttaaattccatttcctttattttaatagtctgtgtgattccgttggaatccgtttcctctttaaaaggctctcccgtatgtccgtaaaaatgatatcggaatattatgttgtccagcacttgtcttatttcagtcattccgtaaccgctttggctgtcgtctttgtcgtgagtaatcaagacatcaaaagtatttttagtttttaacaattttctgatttcctttctttcgtaatcctgaataaaacgcttttcggatctgcctttccggtctccgattcttccgattcctacaaaatgtaaaacctcatcttccgtttccaatgtttgttctaaacccgatttgcagacgaaaactctttcatagatatcaataggaaaaatactttcatccggatttcctttttccagacggtctaaaaaatcgtggtcttcatgatttccgcggacgcagatcatattaatattcagtttattcaaaaatgattgaatctcggggttttctttcgtgaaattatcatgaaaaccaagctcgtctctgtcgtattgtgcgtgttttatcgttgctttatcaagattttcgataatagggtaggctcccaaatctccacactgcaagatgaaatcaattttgctgcctgtttctttctgataaagatcaacaagtttgaaaggcagcaggattttaccgtgaatgtctgaaaagagagcaattttcatatttgagtttggttattttattttcgggtatcagttttagcctttcagaaagctaatctgaaaaacaaatatatcgaaaacaattaaaggaaaaacgttaagtatacagaagtaaaaatcccggatgtgaagtccgggattctgtattgtttactctggaactttcacagaactaagagctgatgaaaatactctttgtagaacttttataattattttgctaccgttgcttttgcagcttcatacattactcttatatcttcatcggtatactttgtaaatttatcgggtgatatatcataagtaataccatccgagatcataatggcattatctccggcttttactccataagtaaatgatagaccgcttgctgtacttctgttcaggaaaccgtttttatcttctgcttcaaattttacaaagccaggattcatttctttatcgcttgctaatgttttaatatctgccactttctcggtaatattgctgtatttttcatcttcattaaatgggtttgaaaaatcttgtttagaaaaagtcattttgaaaaatttccctccataaacagcaatatcttttccatcctgaattattctggctccttttggcgcttttgtaattacattatatcctttgctgcttaaatcaaggtctacaagatctgatgttttaaaatgattttcattaatgctttttttagaagtttgtgcctgaaacagcgtaaacgaaaatccgaaaatcagtaaaagtaaattaaattttttcattgtataagttttgtagaatttcaacaacaatttgttaaaaattttattattaaattttaaagaggttcatggaaatgataaatcctacaactcctgcaaccagccagactattttgtgacttttcggagcttcatttatccatgcttttggatctttagtcttattcctgctttcggctgttgtaatgtccccaccgggaaaaaataacatggcaattccaattaaaacaaaaaccggtgctgctattacaaacttaaaaacagatcctgtggtttgcatcatttcatatcccatgtaagtaacataacctccgcccagaatagcaagaattccaaataatcttcctaatttcatactctatttttttaataatatttgttttattgtctgtaatgaggctttactacaatgcttgtaattttcccattttcccagattgtatacacttttgctatgtttttaataatatcagttactttaaaaatatacagctttccatccggtgaaaagtaatttacttcagctttcatgctcaaacggttaacaggcaaatctccctcgtctttcgtgatcgaaagaacatctttaccatcttttacatatggagcaaaagcatttaaaaggtttatttctttagcgaaagaatttactattttctgagcctcgggagaaatagaattcgtagatttcgtaattttaggattcatcaaaacaaatttagattctgatggatctgtaatcactaatttatcaatcgagctgttgtcatcaatcaggaaataatcatcggtaaatcctttgtcgatatcatgtttgtaatctgacaaagataaatcgtcatcatattttacctccgaatctttactgaaagcttttatgaagatcatttcattttttggatttttcacttctgcatagacgtatttttttccattgggagcaatcaaaagggtagaatctttgtcgtttctgagaattttgctttcttctacttttaaaacggtaatgggattttcatacactttgaattcttttcccatttctatgttttgaggtttttctccacaagatataagcgttaaggaaacagcaaaaaaagatgcagctaaaactgatttatttttcatgttattaattttaagaatatttgtttatgatattttaaaaggcttctccttcttctttctttgatccgttgtattcaattaaagtcgtaaccgctttttttaatctttctaccaaaatctgatccggggtaaaattgaacggagctgaatagtcattatagttaggaccgcttatggagaatgtctgataactacttgctttagtttcattatcgcaaattgttgacatgcagccttttcctgttacataaaaatcgtctgaatattcagaattcattcctgtaattttattaaggtcgatcgttgttgtgcagaagtttgtttctctttcatatggctttttatagacaaattttccgtcggaataagaaacaaatgttctgtatggtcctaggttttccttcatctttccggctatccaatccattgtttcctgcttgcttggttttgaagatttgctttctgtggcaggttttgttgcttttgcaggtgcttttttctgagcatttgcattcatgcctgcaactgttagtaataatacaactgcaaactttaattgtttggtcattatgttttatttaaatgttggtttttttaaggatttaaaattctggctttgtgttttttaatcttttaacggattttttaaaaaagattatgactgtaagcggtagattttaaatggaatttttcttgtgtctttaagtgttaaaatatagaataacacttttacaaataaaaagtaatttttgtggtataatttaaatatttcaacggtttttagtttttaattttggcaaatatagaatttactttacaaatccgcaaatttaatgaatgaaggaaaattaaattaatgcttcacaatttaattttataatttttaaagatagcttcctcattcattttcagttcgataagtttctggatgtggtaggcttcttcttccttgcctaattttatggttccattaactaaaccgttatttttatttttatagtttgataatgtggtatctgtatctgcaaatcatctatttttgttgattataatatcattaattctttttcagcattttgaagttcaatttgtaaagttgaatgtttcagattctcaatccaacgcttcaatccacttgcccagtttttcagcaatagaatcattggtcatatttgcgattttccattggtcgccatcaaattttgaaatgacaatgaaattttcttcatcaaatttaaaagtgtaataaataaatccgtccgatttatctacgtttcctgtaatttcaactttgtatgctctgttgttgaaaattaaatcaattattttatctggtttttgcattttgcttttattctaaatgatggctgactgatctttattattcctcaaaattctttagaaaaaccatcctgaattattgaaatcgccaaatcttctttatttaaaatcgttgaataccaaaatccttttccccagattttgtttccggaaaattcttcggtatattttgaacgtaataagacagaagaggttttgcttttcagtcttgaaattttctgattcagtacttttatattagaaaacacaagtatttcaacttttgattcgttaatatgaagcgctttaatttcaagtccgtcaattatcctgtcgctgttctccctgcaaagttcatgaatatcaattctcaattggtttatagatttttcctgtaaaagaatcctgttgttttgtggatttttatttacatattcatcgggtaactcatgagacaaagtgtagcttatattttgcaggtctaatttcgagtaggtatcagtaagttttttccaacgtccatttttatcccagacaggatattcgttataagttgtccagataatgtggaagagttggttgttacttgtcattaatacagtttaatcattattttaaattaatttactgttttaatgaataaaattttgtttttcagataccaacattttccattagaagtgtcaaaaataaaatcaggatgagctgctttcaaactatcggattttttaagttcgcgtataatatcttcattcagccagtcaaattcaaaatcctttttcgtataattaggaaatacaaaatctgtgtttttatccagatcccatattctcttcattgtctgttcgtcaaaatatataacagcttccaaaaaagaatcggatggaccggaaattctttctccggaattatcaataaaaacatatttaaatttcactttctctggtctgaatttagataaattaattaatttctgaagagaattgatgtccgttgaaacttcagtatttatattgcttttcactttggtttccatatctttattttcttttttacacgaataaaaaaagaaggaaattaaaataaaaatgaatttcagcttcatgaattttagcttttatttgtacatattattgttatcctcagaaaggacaaaattcttgtaaacttatatatttttacttttcaaaatatcattaatgatttccagatgatgattcgtatgtatttccagaaatttaattgcctttttcagttttaaatctccgaaaaaaggatggttgaaatatttattgggatcaagattttccatttgccggattttcgttttggtgaattgcaaatgctgctctaaagtctgctcatcataatgtcccggagttactacttttggggattttgcacggcctcgcggaattttattcaacgcaaaaaccataattttcgaaagtttgaagctccatttataatttttgggatcagatttttctatgttttcaataatggcattaattgtcagcagaatatgttcgatttgccatcctacattggatttcgaaatttcaggattggaaatagtatgctttgagattttttcttcgagatcatttaaatatttcggcagtttattcatcattcaaccttttattttttagttataaattctgatgatttcgccgtttccttttccgtttacgcttcttacgtaaccgttgatgacttttttcatcggaatagggttatgtcccggaaaataatctctgtatttttcataagcgtcttccaccattccggaagagacaacgttcagtctgattcctttttccagttccagcgctgccgcctgtacaaagctgtggattccgccattcaccattgctgcacttgcagtctgtacaacagggtcgtccgctaaaattcctgtagataatgttatagaaccgttggaattcagataatattttccgatgcggacgagattaacctgccccatcagtttgcttttcagtccgatataataatcttcttcggtaaggtcgttaaaatctgcccattttgcttcaccggcgatacagatgatggcatccagttttccggttttttcgaacatttctttaatggaatggctgtctgcaatatccaccgttacatctccggaatttcttccggcaattacaactttgttgttctctttaaaatgtgctgctactgtttttccgatggttccgttaccgccaatgatgagtattttcatgctgagatgtttattattgatgattttcagatgtaatcaaaggtacggaaagtattttaccaaaaagagtgcaaaatttgagttttttataattgaatttcatcattaaatattgcgaataacaaatacatcgtactgtatttataagtcttcaacggtaataatcagtttgtttttcttctgctgaatattcaccatttttccttttccgaaacccagttcatcaagccattttcctctgaggcggatttccggaacaatgataagttggttgctgcttttctgaaatcttgaataaattttaagttttcttgaattcatcatggtgtttttgttatctgataaatttgtttttggttatttgtttttacatttttcaggctgtacaggaggaagttataaaaatacctgaacttccttcctatacaaaccaagggtatataataaattgtgtttttaatctctaaataaacaatttattacgacatttaatgattttatatttcatcaaccttaataaacttgttctaatcaattaattgttcggcaaatgtaataaaatattttcatattaccgaattaggtaatggtaatttatgctaataatttcaatttgcacaaaagagtgcaattatgaacgagtttaaaaccaatgaaatcaaaaaactggtttcagaaaaaataaaagaaataaaaggagagattccttattctaagatttctgaaaagtgcaatgttacagcggcaagaattagtgatgttgccaataacaaaatcgattgtcaactcagtactttcattgaaattgctaccggattaagaattcatccaaaagaattatttgatattatttttgattttgaagagtattattccgaattggataaagtctgagaacagttggaaacccgatgtcgcggatttgtaatccgtgattttaatttttgtattctgaaagtttttgcgaaagatgttcttggtaggtaaatgtcacggattgcaaatccgcgacatcgggtcttgttttgtctgtccgttgcaacttgtcaaaaaattgaaaaaggtcgcaagtagtccaatgtataatattctgttcattttatatgttgctgccattatttgagtctttcgtaattattgttattcacaatgttgtcaggctcgtttattttatcttctggtccaaccgtaacagttaaaacatattttgataaactctgtcggtcagcataacctttagaggcatcaagtgctgttttttcaaattctaaatcttgtccatacatataacgaaaagtaagttgatgagaaaaaggaagtccgaacttatataatttcgtgtcgtaatgcttgacttctaatgccaaattcaaaggaagtgcaactgaatgagttgtaggcattagtcgaaggcttctgaaacgatgtctataatagatttcttcttcaaaatatgtcgtaacaaaacctgttattggctcataatcgtaaagcagaagtcttgctcttggagcattgccgtttatagtcttcagttgagtttctctgacagcgtcaaaagttacagcaccttcggttctcttttttgcctcaagatagccaacgccttcaagtttttctccatcggggaaagtaatgttcattattatagctatgtcgccatattttgtttctgttaatgtcccactttgtttaaaagcgttgatataaacttttgaaactcctcgcaagtcaacaattgttttgcttgaaagtttgcgtgtcaaagcgattaaaaagttaactgtcaattggtcttcgtcccagtaacccggtaagagacgctttacttcatcttccaatatttcttctatttcagatgtaaattctgctaatgtcattgtcatagtttttattttgtgcaggtcatcacttatggttgcagctaacggtttgcagctacccgaaggtggcggtttggaacactaacctgtctatacgcaccaaagtttgtttcaaatacaaatgtttgtattcgcaagtccccgccacttttgggtaggtgctgttagctgtagttatttttcccatataacattcacttcgtcaaaatttatgtcttctgcttcaagctccaatgaatccacttcgtcttttgctaacttgtatttgaaggaaaacttaacgttaaaagtttcttcaactaagaaatagtggtcattccaatcattgtcagtaatatgaatatttctcctgtcatcaattatataatagtctgatttaaacatgaaatattcaattgtaaaaactcctttagcacttacgggaatgtaaaaatagttgtctatgtattgaatttttgtttcgtctacttgaatatcagtaacctcgtcaataccaacaagtctgccttcgttgttgtcgtcaggaatatttggacttgagattataatgtcattaagtatttcattccaaatgtcttcattcgctttttcttttattttttctatgctttcttcaacaataataagttcgtcagcataatgttcaattagtttatatttatcactgattattttaaattcggggaggtcgaacaaatcagaaaatcctttaagtccagttacattagttattctgtcacaagactcacgcaaattagtgtcgtcacatataaaatggagatgtccatatttatgacttatggtcagtaatccttgataaataaaggcgtcaggaatatccttcctacttttcggttcaggaaatggttgttgaccaagaaaataagaagtcataaccaattcaccgtgcttttcgtcaattttatgcaggattgcttttgaatccttgataaagtcattccaatgctttaaagttgaagtttcaatgtcgattgcttcgatttgtttagctagcttcttaaatttcagatgctcgccttcgccaattccttttttgtcaagggtattgagatccttgacaatcttttcgattattgctttacattctaaataattttgtgtcgttgtttctctataaacaacccaaggaatatggagttttagaagtccaagtttactcattttcccaagcaaaagaatgtcagaactttcaagttttctgtcacgtcttaaaatacttgtgtcaatagagatattcatttttcgtacgtcatttataattacagctaacatttaaatttacgcatttcatcaaaatcaaatttataacatgcgtccattcattttataatcaactcaataatattgattaaatcgctgattaaagatttatgaggtatacttttttgatgttttattttttttgtatgggtgaagttttatatatttgatgaaaacttaatcatggaaattatttcacttgtagattcttacaaagagaaattaattattcaaagatacagttcatcgtctgtaaaaaactattcaagtgctcttcagagttttttgagtatggcttctcaaaagtatacagatccgcttgatatttctttagaagatgttgaaaaatttatcttttggaaaattaataaacatcatatttctgcatcgcatcaaagtattattctttcgagcattgctaaattttacaaattaatatttagtaaggatatcaatcttaaacatctgtatcctaaaagaagagaaacaaagctgcctaaatttcttacccgcaacgaagtaaaaaagattcttgaatgcaccgaaaatataaagcataaagctctacttactaccatctattcgtgcggtctgagattaagtgaagttctggaactgaaaatatcggatataaaatctcaggaatctgttcttttaatcaggcagggaaaagggaagaaagacagatttgtaaacctctctcccaaattgctggaattattgagagtttattttaaaatgtatcagccgaaaacgtatttgtttgaaggtcaaaatacagaacaatactcaaaaagaagtgtgcagcaggtatttaaaaactctttgaaaaaggcaaacatcagctctcccgcaaccgttcatacattgcgccattcttacgcaatgcatcttttagaaaacggtacagatatcagaataattaaagaacttttaggacataacgatattaaaactacagagatttatacccatattacagatgtctccaaaagtaaagtcaaaagtcctttagattacttgtaaaaaacgcttcacaaaagcagtataattctcgcaatgtcatggatttgtaatttccatattataaaatcacggattgtaaatctgcgctatcggaatatatcgcctaaagatttattagatattaattttgattaaaaaaagttgggaacgtgatgtcgcggatttgtaatccgtgattttaattttcatattctgaaagtttttgcgaaagatgttcttggtaggtaaatttcacggattgcaaatccgcgacatctgggatttagcactgaacccgccattttgccaaactgctgttagccgttcgttcatttcatcagttctatattttttattctactaaacccgatgtcgcggatttgcaaatttttacgaacgaggttctttgttagaaaaatgtcacggattgcaaatccgcgctataggaattagtttttactaaattcttgaaatagtaaagagtaattatccactttattttaactcatatgtaccaatttcgattttagattcttctaagttttttagtccttgtaaatatttgtctctcagccaactgtttactggtgttctaggatgtttatcaagtaattttttacctaatccagctaataaatagtccataaatctccaaatttgaccttgtcttgcaccccaaacagcagtgtcaaccattgtattatcaatatatggtttgatacattgatcaacttcagcaagatttttaaatcccatttttattaaattctttgtttcccattcgtatgaaaaattacctattcgtccatctgggcctaatgttttatctaaatatgcttttaatgaatcaggggtaatttgtacatcttcaagtttaccttcaacaacggattttcgatcagaatttttaagtttttcatcttcatcttgtattgattgaaactctctatctgcaatttcaagtactcctgctaaagcaataaaccttcgtttaatagttgatggaattgtaattgtagatttatatttaatatcatgttcaatctctgcccaagcatgttggagaatagtccttacttggatttctgatatcattttatcaaaagtttgatattcaggtaaaataagtctattatctttaagtttaaccaagtaatgaacactatgatatccaagtttctcttctttttctaatattttacttttgtcgctaacctcaattatatcaaattgactttcaattaattttccaatctctttaattgtttttggaaaaaaagcaataatcctaacacctgataaatcagtaatttcttttaaggggtttaaatatttaggtttgcttatatcattttcatttggcttagaagctttctcaccaaaactttcaatttcttttgctcttgcttcaattgaatgatagttaatcctcttttccttaagagttttagttataatttccttgagagtatttgcaaataattcgtatgtaggtcgtaattttgaatagctacttattgcttcacttctatgtttatcgaaatcaaattccatggctaattgtatttatgatttacaaattcaaatattattagttttaaaagatgagccaaatatattaatttatatttcataaaaataaaataacagcgaaattcatttgtcgaatctaatggatttaatagatttttctaataataagataaaggaaaacaattattttaagataattgaaatctttgtagcgtattccattgcagaaccgatgtcgcggatttgtaatccgtgattttaattttcatattctgaaagtataggttgcaaattttttgcgaaagatgttcttggtaaataaatgtcacggattgcaaatccgcgacatctgaactttcatcttcaacaaaaaaatcctaacttccataattttccttcagttttctcatcaacagtctcacgccttgttgagtatccggattaaaagagttggcgaaaataatatacgctttgtgctttattctgtcgatatgaacaagactgtaatacgttcccgctgtaccggaatgggtagaaagttcctttccgttctcgtaaatattaaaccatccgatcgaataattcggaattcctttgtggataaaagtatacgttttggctttcaggtaattgttttttccttcaagcccctgaatattaagctgaatgaatttgatgtaatctttcagttttatattgatatctcccgaaggttctgtgtaatccagatgataattaaaagtggaaggaaccggttgtagtttaccatcttctgtaaaatgtccccaagtgtctttcttatcctgattttccggccacgataattgtacgtttaattttaaatctttgttaaagacctgatcaaccagttgttcccagtttttaccagttactttttctaccattaaagtcgctaaagtatatcctgcattggaatagacaaaaggatgctgttcgtctgtttttgcaggttctaacgtcagtacaaactctccgaactgttttcttttttcctgatgagttcctttaaaatccggaattttgggatcgtctcctccctgaaacggctgaattcctgctttgtgggaaagcagatcttgtaaggtaatattggcatattcgggtttgcttctcgacttccatttgggaaacagatcgaaaaatttagttgtccattttaattttccgttttcaacatatttggcaatgataaatgcagtcattgctttggtgttggaaccaatgtggaatctgtcgtttaaagttgccgtgtccggaagatcaacagcgtgttttcctaatgccgcaatttccagtgtagatttgctattgattacggcgtagcttatttccggaatgtgatagactttgcgaatagaatcagcaaaatgaacggttttctgcccgaaacagataattgacagtattatgaaaaggaggaaggttatttttttcatcggtttttaaactagtcataattgattacatatttcattcccagctcttttacatctatttttaaattcaatggtgatgggatcagttttaaagtgctttcattcatattggttccggaaattacacctagattattctccagagcaatttctataaatgtacaaaagtctgagaaataattatccgtctttgcatccgcagaatagatgttctctttatccatccacaaaagctgtaaatcttcattcgttacccaattgatcagtccattacaattggaataggaggaataaaatatacttcccaatccgttattggtaaagttgttcataatttcttctgcagtggaattgggtgttgccattacacaacccgtaaatatggttctccccaatatcagatgaggattaaatgcagcacattcagaaaaaatgatgagggtaagaagggaattgatgatttcgataatctctccattagcattctcaaaatctctttcatcctgaaaacgtttttcaataaaatctgtatacgattcgttgatgtttttttctcgggtcataatctcgtacaaggtttcatgaagtttaaaatctttatctaaaaacctgctgaattttattatttctgcaatttccttatcaattgtatcctcgcgtctgtaaagtattctttttgcaaatttcgaattaaaatatttatggagaaattgtccgtcgtttttaagatcgggcacaatttccgagtagaattttctgtcgtcgaaatgatgtaaagtattccatgatcccatattttttttgataattagattaatctttaaagtaagtggtaaattctgctaagatcaatttttcataaaaaatgatcttttcattcggtttaataaaaaggtgttttcaaaattcacagttaaattatgactgcggaatatgcggaaaattaaaatctgttgagggtgagtgtttttcagctcaaaagttccgttatttctttatgttcgcggttttgcgccaacaggagagcggtataaccttctgcaacaatacttttatctacaccattttccagaagtaatgttacaatttccttatatcccatttcagatgctcggtgtaaagcggtaaaaccacggtcgtcttttgcgttcacatcagctccaaagtgtaacagcatctttaaatgttctattttgttggattgactggcattcatgataggagttgccccctgaattgttcttgcgttcggatctgcaccaagttccagtaacttctgtaaggattctgtattttccggtgcagttgcccaatgcaaaggcgaaagtccgtcgccggctaaagaattgatgtttgtaccgttattgatctggatttcaatttcctgtatgttggattgtgcaacagcaatatgcagtaaggagtgggagcggagcattcctctgggagaggcggtaaagttctcgtcaaaagttcctacatgtgctttgtttccataactcgaaaatgcccaaagtcctgccttatatgtgtcggataagaaggtttcaggcagaggagccagagcaatttcttccagaacatggcttataagaagaaagtttaaaaaagcatttgtaaaagcttcagtttctccttccgtaaattccccgataatctgttcgatgattagctgattattcttttgcgaagttttagcaataacaaaaacctctctcagccagcttctaacaaatatcagatattctccgtcgaaataaattgcccatttgtgctccattgtttcgggtttaaacaatactcccggagccaaagaaccatcaattataaattttaaacctgattctacggttctgctgtttttaggatttatattccaaaaagttctgccatcctccgtaccgtaagaaatagcattagcagccatctgctgattttgagaggttgaaatcatggtctggcttaaaggtcttaagtccagaagttttatattccatgggttatcggcagattctatccatggcaggctttcttcagaaggttgtggttccggctgttgttttttgccaaaaagttttttaaagaaggacatgatcttttgttttaatgagaatcgtttgaatttcctctcaaccattggttcatcaggagaatttgaataaatttatacaattttgaaacaggaaagttatgatttgttgaacgaataatacgtcacataagtccagtatacagaaagggtagtgatatcgttttttatttcctgaagccagtatatatctttaaaatcaaatacattttcaggttttttctccagaatttcgtcgatgtctttagagatattgatgatttcgttgtagagtgcgttgttttgctcttccagaggatacatgtctccaattagatcataaacttctccgccttccataaaaaacagatccagctctctttccggatatttttcaaagaaatcttttgtttcctgtctgtatgattgtattgcttcggcatcaagatgaggctgtgtctgaaggtaatccagaaaatcgtaaaatttattcagccctttttgaaagtttgctgtaataacgatgggaagctcaaagttccatatttttgaagtcgacgttccggtttctgaacccaaaacgattttatagaacagcggaatttcatttgcccattctgaaacatcacgaaatttgtttaattctttgtttgcactgtataagtacgttctatttgccattgattattagttttttttattagcttatccgtattctttcaaaggtatgtattactggaatcttatgcaaataaagtttcagctgttactccgaataaagattttttagaaatataaaatgccacggatttcaaatccgcgacatgttgttacaaactactgttttttcttcatactttttctgaaagtaaatgattttgtatatgttacgatggtttatgttttatccaccgtaatgataattttgtttttcttctgctgaatattcaccatttttccttctccgaagcctatttcatcaagccattttcctctgaggcggatttccggaacgatgatgagtttgttgctgcttttctgaaatcttgaataaattttaagttttcttgaattcatcatgatgtgttgttaaatgataaatttggttttggttatttgtttttaaatttttctggctgtacaggaggaagttgtaaaaatttataaacttcctgcctatacaaaccaagggtatatgataaattgtgtttttaaatctctaaataagcaattgattttatattaaatgcttttattcgacaaatataacaaaaaatcacaatactggcatatatcccaataatatttattttttataaatgcaatttagttgaaaacatagtattaatggattttcacaaagacctgcaaattttgataggaaagcgtatttctgaaattagaatgaaaaataaccaaactcaacaagatttagaatttctaacaggtattgattcggcagaagtaagtaaatatgaaaaaggaaaaagaaatctaactttgaaaactatgataaggtttgccgtagcattacaaattcatccaaaagaattatttgattttgactttgatatagaaaagtataaaattgatgagtaaacctcgatatcgcagatttgcaatccgtgattttaatttttatattgtataagcgttgattgggaatttttacgaatgaggttctttggtagggaaatgtcacggatttaaaaaccgatgtcgcggatttgtaatccgtgattttaattttcatattctgaaagtttttgcgaaagatgttctttggtagggaaatgtcacggattctaaatccgcgacatcggctatcggtcagttctttattcatcaaatctatttttcaagtccattctttcgtgtaaaattcttacaacttcaatcctgtcttttgaaataacttgatagaaaattatgtgttttccagttctcaaaccaagcaaattcttgcttattccatcatattcttttccaagttcaggggtttttcctatttgtgtacaggcaaactctatagctgcatagtatttatcggcttgtttttcagaccattcttctgtagtgtaaatccaaatgtcatttaagtcgtcaatggcttccagtctgaaaataactttagccattttttcttttttcttcttttaatttttttaaattttctttgaagtcgaaattttcaacgagaggactgtctaatcctttctgaattgcagctttcagagcgattactttgttttcttcgtcctctaaaagtcgaagtccggcacgaacaacttcgctaacattcttgtaacgtcctgatgaaatctgactacttacaaactgatcaaaatagtttccaagtgatattgatgtatttttcattttgtccaaacttttctcaaagttaccaatttttggtaaatgtatatgtgttccgtttacactttttcaattaaagttgttaacgtgctttcacaatatgaatatggaaattaaagtcatggattgggaatttgcgatattggagcacccaatatcccatttgtgttgatttgttttttaattgaaagttgaactttagaaagaatttattaaattatttaattctgaacatgtcgcggatttgcaaatccgcgacatgttgttattctcctatttttaatcagcatatttaatggataattcgtcttctaacccgagtattgtcagtgcctcttttattctgtcaaactttatagaattgacaatattggtgtaaagataatatgtgtcatttaacttttcataatctctttcaagtctttcgacgttaatgtcactcaccaacattattctttctcgaagacctgttgtaaaaaataattcagaagacaattcaaataactgtttgaatacagaaacataaaaatcttttgcggaagatacacttgttcgttggttcaataagacataatattctatctttctaccattagggtcttctgcttcaaatatatttacttcgtcattttcgtgtaggttttctatttgaatatcaggatactgccaaatatgtaaaaatctttcagcaattacattcgtacgattttcaatttctattctattccattttgtgattgtttttaaatctctgttaagccacaaacgactgaatttatatccctgctctttgttttcatcattcattacttgtttttcagtaaaatacttgttaccaagttttccgttgttgcctgacagcgtcaggtttccgattgtatttagataattttctttaatgtaattgtattcctcattacccaattctattttccattttgggtcgggattttgcgggaaaatatgttcaatagttatgtctgtattcccttcaatagcaactggttctttattttgatggttttcaagtctttcaagaaaatatgttctgtttttggacttaatgttgtaaacatctttttctttaagtgcatttatggtttcagtatttcttggaaaacgctgaactcctgaacgtaacaaaagagatttttgaatggaaaaaagataattgtcttgttcaactttatcgtataacgacataaatattttgttcagggcattggttggcaaaccaacaataaagcgtctaaatgtgaatgattggataagcgctaaaaccgatataagaatttgcttattaattacctcatttgaataatcttcatatactttcattaagaagggaaaagcaacattaacttcaagcttattaataaattcaagttgttgtctaatcgctttgtcttcttcgtttttaggatttacaagtttgttgtaaaacttactcaaagattttatttcggataagttttcttctaaaacatctaccgttgcagttggatagatttctttaaaagttaaataaacatttgatttatttggtatttctttgttttttagagttaagaaatcacgaatgaaatcggaaactctcgtttggttaagtgtttcgtcttttgcgtttttttcaatgacttcccaaaagcttttataaattttttcttgatttgtccttgacaaccccatcagaatatagtttcgtatcagatctgcctgtgataattctaaacctgttgaatttagactttcaaaaattctttgcggattatctctttgtctgtcaagtgcaatatcaataaaaatcagttttgacagacctctctgaatagtttcgtaattatcttttgtgacagagtttttaaagaaattgaagttttcaattattttggaatagcctttaaattcttctccgtcttctgaatttaaaatatgatgtaatgcttctttgttattctctgttggtttaagtttaagtttttcggcttctggtgcaaactcgttaatcaaatatgttttgtgaattctatttactaacatttgattttcaagtttttgagcaagtctataaagagcaatgtaaattagtgtaattgttgttaagcgttgttgtccatcaatgattgtcagttccgtcaaacctgatgctgtgtaaacatcatcgtgaacataaacgatacttccaataaaatgagcattaattttatcgtttttacctgtttcaataatgtcgtgcaaaagttgtctacattgtatcagagtccaatcgtaatttctctggtaaacaggtattgcaaaagttgtttcgttagttgctaaaaacttatctactttggtttcgtttgctttcatatttttttgttgttcaagttgtttatggttactccgataggtaacagctaatgtttaaatttaagtattgcatcaaatttagatttatatgtgcgtaaatacttttgtaaatcttctatgatttatattttaatttaaaatactttcttctgaaaaaatcgggaaggaaaaataagaagttaatttcagttttttcactgtttaattagtttattcaaatgtacttaaaagaataataaaaacaaaaaaccgctctgaaaatcagaacggttttatatataaattgtctcagcgatacgctgttacatcattcccggcattccgccacccattggcattgccggttcgtcttttttcacttctgtgattacacattctgttgttaaaagcattcctgaaacagaagctgcattttcaagggcaactcttgttacttttgtaggatcgatgatccctgcttctagcatgtttacatactcgtctgttttcgcattgtacccgaaatctccgcttccttctgctactttagcaacgattacagaaccttctcctcctgcgttggcaacgatttgtctcaatggctcttcgatcgctctttttacaatcttgattcctgtattttcgtctgcatttgcaccggaaaggctttccagagaagcgattgctcttaccaaagcaacaccaccacctgcaacaataccttcttctacagcagctcttgttgcatgaagcgcatcgtccactctgtcttttttctccttcatttccacttcagaagcagcacctacgtaaagtacagcaacacctcctgctaatttagccagtctttcctgaagtttctctctgtcgtagtcagaagtagtcgtttccatctgagctttgatctgtgcaactcttcctttgattttgctgtcgtcaccaccaccgtttacaatcgtagtgttgtctttgtcgatagaaactttttcagcagttcccaacatatccaaagagatgttttccattgtgaaaccttgctcctcagaaattacctgtcctcctgttaagattgcgatatcttccaacattgcttttcttctgtctccgaatccaggtgcttttaccgcagcaattttaagagaacctctcaatttgtttaccactaaagttgccaaagcttctccttcaacctcttcagagataattaataaagattttcctccctgagcgattggttcaagaacaggaagcaattctttcatagaagagattttcttctcaactaaaagaatgtatgggttttcaagttcagccaacattttttcaggattcgtcacgaaatacggcgactgataccctctgtcgaactgcatcccttctacaacgtctacggttgtatcgattcctttagcttcttctacagtaataacaccttctttacctacttttccgaacgcttcagcgattaaagcaccgatagtttcgtcgttgttagcagaaacagaagctacctgctttactttatctgtagaatcgcccacttcctgagattgagcttttaagttttcaacaactgttgcaaccgctttatcgattcctctttttaaatccattgggtttgcacctgcagctacgtttttaagaccttctcttacgatagcctgtgccagaacagtagcggtagtagtaccgtctcctgcgatatcattggttttggaagccacttcttttaccatttgcgctcccatgttttctactctgtcttcaagttcgatttcttttgcaactgaaaccccgtctttggtaacgtgaggtgcgccgaaagatttttcgattaccacgtttcttccttttggtcctaaagttacttttactgcattagccaatgcatcaacacctctttttaaagcgtctcttgattcgatatcgaattttatttcttttgccattgttttaagcttttggcgatttgcttttagcttttggctttagcaattcgcggtttattttttataatttgattttaatttccgttaagcttttttgtcctatttacaaatatgcataagtaccattttttttaacaaatgctaaggcaactttatcagcataatattgttgtcctaattttactaaatctttgtaaacggattttacgagagtataggttcctctttttccagaataatttgtcccgtaatttgttttaaagttgttatggttcagattttttgcaagatcaaatccggacattgtttttccttgatttgtaagataaattgctaaattcttaatatattgctttttaggattcatatttgattggttttatttaaaaaaatatacataggaatcatctgtaataagcaaaaagcgattagccaattattcctagtaaatctccctcttttacaattaaataatcttttccttccaatttcaattcagaacctgaatatttcccgtaaagaactttgtcacccacttttacagttgtaggctcatcttttttgcccgggccaactgccacaacagtaccttcctgaggtttttcttttgcggtgtccggaataataatacctgaagctgttttagtttctgcagcgatcggttcgatcaaaactctgtctgctaatggtttaaagtttactgacataatatatttaattttttaattatttctgtcttgaaattctctaattgtatgccaacacaggcaaaagaaaattttggcagactaattttttttgaacggaaattttggcagaaaaaaagtcacttcaaaaatgaggtgacttgtattttattgatgacaagaatctttgtaatcgtcaatcagttttttatagatatcagtgtatattgctgatttatatttcatatttatttttgatgcttcagctcctcttttacctttaagtgctgcttttctttcgtcatcggttgctcttttcttttccttaaaagttttattggaaaaataatcgttctgtcttgcttcatctacttttttcagaaactccggacagtccgctcctaccatttcataggctgtatagaattttttgtataatgttttaagattaaataaatctaagggacttaatgaaggataatctaccggcgcaatggcaacggtgtcgtctggtttgcttaaataaaccattacataagttaactgacaatcgttttcgtttccattggaagctgcggaataattatttccaaaatctgccttgcacatcatgcttctgtaaccataaagatttatcagtcctttttccatcaaaggaagcatcagtacttttccttcggattccagttcctgatctttgttgatttcttttaccaaacgtttgtccagttgaaattgttcctgggtttcttcatttgtatacaataaacttttaatatcagaaacagggattaattgtacttgggtatcgctttttgaagatttaaattttacttcttttctgtctaaattggcatatttagatccttttcccatgaaactgaatgttgtaacatcaggaagcataaagtcttgcgcaaatccttttttcgtactgccgtcttccattagaatttctatgggaaggaaatccctttttcctgtataaaattgtagagattgtgcaaaaaagttttgtgctgaaagaataaacaccaataaaaggctaagttttttcatggatattttaaagttttttatcaggtgcaaatctaaaaaaagtatccagattctgaatacttttaaagaataatctttttatttcacagattccataaccatttttcttccgtcggaatctatttcctgttttaataccttccttgttgaagtatcaatgtagtaagtaatgacggactttctgtcctgaatatcatctgttgtttttacgatccagactttattaccgttaagatctcctttgattatattttccacatatgcttttataacgccttttttagcagccggattataatcgaaaatcggaatttccacagataaattttcttttagaggcataaatcttatgattgcgggataggcattgctgtcgaaatattcagtagaaattttttcgtcaataatgtcttttttctgtgcttttttatcgaaataatatcctgttgctttatttttttcaaacttaatcaccatttctctcatcatattgtaggaagaatgatacatcggctgaaaatctgaaattctaaccaccgtagaatccgtccatggtttatccggagcctgattcatctttaccgtagttttaagaagaagtctgtttttgtctaacttttttacctcagaggttattttcccgatttccattttctggtcacctttttcggcgtaccatactgcatcggaaatttcatctttaatgtattgcgattccagttttacattacttggaacaatggttttctgagcaaaaaactgggcactgctcattattaaaaggatcagaaatagtctcatgattttttaataataagtagtgccctttatgtaaaagttacagtacttttcggcttattttttccctgcagcctgcatcggatttacttttccgttggaagcgcctcttgcatttcctgcttctttctgcttaaagagatcgaatttggaaacctgtgccgttccgccgtcattgctccagaaattgttggaagtatcaatatcggcagtttctctcatcggatccaactgaacagatttcagtttcttttcaaagtaatacgttttagaaactttctgctcgttcattctccagatctgtgcagaagatttgtcggtaagttttgttccgtcctcaaaagtaaattctaaaataatcggcattaccaaacctcctttgttcacgaaatcaatctgataagcagtaagatttttaaatttatctttttctttctgcgttaaaggttcagtaccgtcgaatttggaactgtattctttgttgttatccactttttcctgacctctgtcgtatctgtaatagaaatcctgtgcttccttgtctttatctacgtagaacgtaatgtttttatcttctctgtttctgatttttgaaatgtcttcaaattcgttcagggcaggtttatcaactttatatttattttctttggcttctcttggagcagtattcagatctggagttgcaatcgtcactttatcaatcgcaatatctacaggatctgttccgtagaaccatcctctccagaaccaatccagatcttcaccgcttgcatcttccatcgttctgaaaaaatctgcaggttcaggatgtctgaaagcccatcttttcgcataggttttaaaagctttatcaaaaagttctcttcccatgatcgtttcacgaagaatattcaatcctgttgccggtttggaatacgcattcggaccaaactgaataatgttttcagaattgctcataattggctccagttgatctttcggaagtttcatgtaatccacaattgtccacgccggacctctttttgaaggaaatttattatcccatttttcttctgtaaggtattccacgaaagtatttaaaccttcgtccatccagctccattgtctttcgtccgaattaataatcatcgggaagaagttatgtcccacctcgtgaatcacaacgcccaacattccgtttttaattccttctgaataggttccgtctttttccgttcttccgtaattgaagcagatcatcggatattccattccgtttgccgcttctacagactgtgcaacaggatacggataaggaattgtaaattctgagtaggttttaatggtatgcgcaactgctttggttgaatattttctgtataatccataagcttctttaggataaaagctcatcgccattactttattgttgttttcaggaatcgtaacgcccattccgtcccacacaaattttctggaagaagtccatgcgaaatctctcacgtcatttgcttcaaaagtccatgtttttctctgctttgaatgatttttctccgcttttttagcttcatccagagtcacgatttctacaggttcagtagaagttttagacttgttatatcttgctaattgctcagatgttaaaacctgatcatagtttttacattctcctgttcctcccacaacatgatctgcgggaacattcatcgaaactttaaaatttccgaaaaccaaagcaaattctcctcttcctgtaaactggtgattctgccatccgtggaaatcactgtaaacgcacattctcggataccattgcgtcatcgtgtaaagatcgtttccttcttcagggaagttttcgtaaccgccacgaccacccattttcattcggttcgggatattgtagttccagtctactttgaaaaccagtttttctccttttttcagtactttaggaagatcaatacgcatcatggttttattgacggtatatttcaaaggatttcctgaagcatccgttactttttcaagatttactccataaccattatcgattgccggaacttcagaagctttcaactgttggtctgttgtcgctttcggaagggtagaagagaaagggaagtccgctttctttaccgttgactgttgattctcatcaagctgaagccagatataatccagatcatccggagaattgttgtaatatgtaatggtttcagaacctttcagattccttttgtcttcgtccagataagcattgatctcgtaatcggctctgttttgccaatagccgtgaccgggagctccggaagcggttctgtagatattgggcgtaggaagaatggttcctaactgttcgaatttatttccgtggttgcttccagggttgttctggatattctgtgcggtgaaacctgtatacgcaaatacagaaagagaaagtatggcaacttttagtttcataaccgaaattgttttaaagattttcaaatataataataagtagctgaaaagttgaaaatgtttcagcgttaaaaaggaattctttctaatgtcatttttaaggataaagcaaatacaccggaagagataaaaaggatccagtctttctggttcactttgaatagtttaagcaaaataaagagcagtattagaatcccgaaaacaatagcgatctgtcccaattccaaaccgatattaaaccctaaaagaggaacggcaatactctggcttttggcaatcatcactcttgcagtattcgcaaagcccattccgtggatcagtccgaaaattaaggctaaataataattggcgttattctgagactgttttttatttcggatgagaatattattcagcgaagttaaaacaatcgtcagcggaatgagaaattctacccagtctgaattgattcttatgatatcaaaagtgcttaacgccaaagtaatcgaatgaccgatggtgaaagcggtgacaagaattaagactttcttgagatcgctaaaagaatataccgcaattaaagccagaacaaaaagctgatgatcgagtgcatccaaagaaataatgtgttcccagccgaggttcagatagaataaaaaatcctgcatttttccaatattatttttgaaacgcgatgatacaaaatttattttaactttgttataaaattcaatggtatgcttgttaatatagaattagaaaatgctgaagattttgtctttatcaaacagcttttagagaaaataaaaggtgtaaaatctgtttctgtaaaagatgaggaagaattttatgaagacggaacgccaaaatggtttatagataaacttgcggattatgcagatcgtctggaagataaagacatggtttcagaagaggagtttttttcatatgcaagaaaaaaagcgtgcgaattatattctcgaaagtaattcttcgatatgcgacaagatccacaaaaaatccttgaattgttacaataataatttattttaactttgtgtaaaatcaatacaatgaaccttaccatagaaatagataataaagaagattattttttcgttaagcagcttttagaaagactgaaaggagtaagaattgtagaaaataattatgaaatggttgaaggtctgccttctcatatttttgaagaaattgaaaaatatggggaatctctgaaagacggagacatgatctcgaaaaaggatttctttaagtttattgatgaagaaatatgcaggttgaattctcagaaatagcaaaaaaaaacgttagcagagaatatcgaatttcttaagagaatctggacaaatcgtgaagttgttattttcttagaagatgtgaaaagaataacgaatgatcttgaaaatggaaaatattctcagtttcaaagttcccttcacaagacgaaaagtgttttaatcggcaaaaaacacgtaagaatgttcttccgaaaagaaaacgagactaagattaaagttcttctgttcttcgatatgcgacaagacccacaaaaaatccttgatttattacaatgaaaaaactgtttttcttctttaccgttttacttatatttttctcttttacaaaggcaaaacatccttatcatgtaggttctgtggaaattaattacaatcagaaatccaaaacttttgaaattacaggacgtttttttctcgatgatctggaaaacggactgaacaataaatacagcaaatcacttcatttcaacgatccgaaattcaaagcacagctcaacgaatctcttaaaaattattctgcggaatattttaagctaaaaggcaataataaatttctgaatgttaattatgtaggctacgaagaagatcatgaatcggtaaatatttaccttgaatctgaaaaaatagacaacccgaaaaaagtagaagcagcagtaagttttctgtataacttatttgacgatcagatcaatattgttcacatcatcgttaacggaaaccggaaaagcgaaaaactaacctatccgaatcgttatttgtttcagcagttttaaaaattaattttcgagctgtaaaagcgcattgattcctttggcgtgttccaataaatcaggaaaaaaatcatcatagcattcctgaagaaaatctttattctttagaaaagcttcgtgaacgggaatatcaatgtttaaatattttgctttgttgagaacgtttctcatgctgtagccgatgtttttatcgaagcggtaattgtaaagccaatcgccttcttccattttttcaagcatgattctgaaattttcgggaagaaattcataattttcattcagaacacgatatactttttgggaatgatttttccagccctccagagagttcagacttaaatcattcgctacaaaataatccatcgcaacatccacaaaagctccggcatacaatcttaccaaaggtgtaaaaactttttttgcttcatgaatggcgggatgaccatctgtaaacgtatctatggagcggtgtaaagtaatgccatcctgaatatctttcggaaaagaatagcggtctctgtttttaataaaatcttccaaaaactgaccgacaatctgtccgtctgtaaacgtaaggaaggagtgcgccaaataattcataaacgaatatagaaatttttagccagaatttccccgttgcggtgtgtttctgcccaaactccgttttctgtttcagaataggtgaaatcgatgggatggataacaattttttcttgggaaaaaagacttaccaaaagttcgccatcaccgacgaaacattgtagctgaaccggaaatgaaaaaatattttgaaactgtaaatctttgtaaccataaactacggtacagtctgaacctaaaggtgtaaaacgctcatgatccttataaatatctatggaatgcggatatctttcaatgatttttaagcctgactgtaatgccaaaaagtataaaattgaagaaaactgacagattccgcctccaaaatcactcgaaatattgtttttaattaagttccttccttctttaaaattatttttctcattcggttttccgatcagtttccagaaagaaaaaacttcgttgggataaataatcagatggttgattttttctccgacaattttcagattatgaagtttgttctcataaaattctcctttcctgatgatttgccggagctcagttttatattctccaatattttctgagctgtaatatttcggataagaatattgggttttgctttcgttaatataccttctcaataatttcaattgtagtttaaaaccatgtggaaggagttttcttaattgctgtctcatatcttttctaaaacaacaatgtgataagaagcccagtttttcagaacggttttacacagaaaaatatccagagacagaaaatatcttctcagttttttcggaatcctgtgaatggggaacagtaaaattccggctgtatttttaatcttccattgcttttgagaaaacttaaaaatttcttccggagtaaaactgtttccagcgtgccaatcttcttgaggagaaacaacttttcgtctgtttttcgtaggataatcgaaaattaaagttccgtttttggttaatttcgaaaagcattcatctaaaaaagcttccgtttcttttctgttttgatgcatgatgacatggaaacagaaaatacagtcaaattcatccacaaaagggatttttgaaatttctcctttcgttaaaattttttcaggatatttttgtcgggcaatattcagcatttcttcactgaaatctgcgccgtgagtggcaaaattcagcagacgacctgttccgcatcccaaatccagaacttttacgtagcttttatctctaaaaaaggaatttaaaaaagctctttcctgttcatcgatgtattttccgtaggaattcccgaaacggttttcgtcataggtttttgcaagatggttatagtaattgaggatgctggttttcatcatttaatatggtgtgttttaattaaaataatctttcatgaaaatcctcaattttgcttacctcttcaattttaatcccgaattttttcttcggaagtttatttaaattagaaatgaaaatcttttcgtagcctaatttctctgcttcggtaattctctgttccgcctgtgcgatcggacggatttcgccgctcagtcctatttctcctgcgaagcagtaatgctcggaaattgcaatatcttcattcgatgaaagaatggaagcgacaaccgctaaatctaaagccggatcatcggtttttatgcctccggtaatatttaagaaaacgtcttttgctccgagttgaaaacctgctcttttttccagaaccgcaagaagcatatttaatcttttggcatcaaaaccggtggaacttctctgcggtgttccgtaaactgcagtacttaccaaagcctgaatttccaacagcattggacggtttccttccagagttacagcgactgaatttccggaaagttcttcgaattttttggtgattaaaatctcagatggatttttaatttcctttaaaccctgagaaatcatttcataaatcccgatctcggaagtcgatccgaaacggtttttgttggctctcaataatctgaaaagatgatttctgtcgccatcgaaattcaaaaccacatccaccatgtgttccagtactttcggaccggcaatttgtccgtctttcgtgatgtgaccgaccaaaaacacaggaacattgttttctttggcgtatttaataatttcattggagcattcgcggatctgggaaacagttcccggcgaactttcaatgagctgtgactgcaatgtctgaatggaatcgataatcacaaagtcgggctccagttttttagcttcatgaagaattttttccagattggtttctgtgaataaaaaacagttgggattttggatatcagtcagacggtcggctctcattttaatttgagaagcactttcttcccccgaaacatagaaaacttttttcttcattttcagagcgagttgaagaagcagggtagacttaccaattcccggttctccaccgatcagcgtaacagatcctaaaacaattccgcctcccaaaacccggttgagttcttcggaaggtgtttttattctcggttcttcattggtttcaacttctacgatattgatgacgtgctgtttggtctttgaaaaaggcggcgttttgtgtgaagttgttttttccaccacttcttccaccaaggtattccactgtccgcagtttttgcactgtcccatccattgggaatactgggttccgcagttctgacagaaatatgctgttttgagttttgccatactgcgaagttcaaaattttttttgaatttttctttcgaattttaattaattttcggctatgaaaaatatttttttgagtttgctggtttttatggtaatgtcacttttgcatgctcagtttacagaatggacggtgagatttctaagtttgcccggtggagactttggaatgtattcttattttattttgattttttgttctgtaattactgcaatcggtttgctgactgtgattatttttagaaaaagttatcattcaatttttaggatcgctattttatttgaagctatttatttattatttttaatcatttcagggaataatccttttgcctattttaccaattcgagtaatgaaaatcttttgatgatcatgatgtatctgaattctttttttgttttactgatgatgtttttaatagatagattatattcaaaaataaatttagcaaaatcaaaaaataacatagatcaatagttcgttgttataagtaacttacctttgtacaacaattaattcaaaatattatacaatgaaaaaattacttttaacctttgtatttacattactaagtgttttcagttttgcgcagacagactgggcggtagatccgatgcattcttctgttaatttcaacatcaaacatatgggaatcagctttgtgcagggaagatttgataagtttgacgggaaggcttccacaaagggcaatactttagaaaatgcagacctgaattttacagttgaggtaaacaccattaatacaggtgttgaaatgagagataagcatttgaaaagcgaagactttttcagtgcagaaaaatatccgacgatgagtttcgtaacgacgtctatgaagaaggataaaaataatacctacactctaaaagggaaattaactataaaagacgtaaccagagatatctctgttccggtaactttcggtggaatagcgaaaaatcaacagggaaaagaagtgatgggtttccaggcaagttttaccataaaccgtttggattacgatattaaatatgatcctactggaactggagttgctaaagaagtagatgttaatctgtattttgaaatgaccaaaatatagtttttacgcattaatattgattaagaaaggttttcagatgttgagagcctttttttatttttgattatttttttgacagcaaatcaagataggttttttctaattcttggtattcttctttccagtcttgagatgttttttccagcttttcaaaattataatttaaaatttctatttcttctaaatgatcaacagtgtttcggtcttcaatatggtcaaaatactctgcgtaccaaacatttaaattttgatttgaaatttcaatgtacagttgttctccaatgtgactctgcaatagcaaatggtaatttaaaatattctttttgaagtaaataaaaatgccttcgtaataatcatggtggcgatctgtaaagtatatattaaacctgttgtttttccagattggtaagttgtcaaacttcaggagtagtccattttgaggtaagagctcaaccttttttaaatagactaattggttaagaattttcattgttacaattttcgaagttctaaaatacataatcaaatttgaatacaaaattgctttgtatttctttttcccctaactttgcacaaacctaatctaatgagtaaaaagaatactaagtacatctttgtgacaggaggtgtaacttcatctttgggaaagggaatcgtttcagcttctcttggacttctactaaaatcgcgtggcttcaacgtaactattcaaaagcttgatccttatattaatatcgatccgggaactttgaatccttatgaacacggagaatgctacgtaaccgaagatggtgcggagacggatctggatttaggacactatgagcgttatcttgatgcgccgacttcccaaaacaacaacgttacaacaggaaaaatttaccagacggtaatcgaaaaggaaagaaaaggagatttccttggaaaaacggttcaggtaattcctcatattacgaacgaaatcaaacgcagaattaaaattttatccaaacagaactacgatatcattattacagagatcggtggaactgtgggagatatcgaatctttaccttacattgaaacggttcgtcagttaaaatgggaattgggggagaataattctatggtaattcaccttactttgttgccttatctggcttccagcggagaattaaaaacaaaaccttctcagcattctgttcgtcagttgatggagagcggaattatggcggatgttttggtttgccgtacggagcataagatcccgaaagatcagagagcgaaactggctcagttctgtaacgttcctttagataatgtaattgaatgtaaagatttagatacaatctatgaggttccaatgtaccttcagaaacaaaatttcgacgatgtggttcttaaagaattggatctgaaaagtgataaagaagcggatcttaaagactggaagtcattccttaaaaaattccagaatcctaaaaaatctatcgaaattgcgttggttggaaaatatgtttctcttcaggactcttatatttccattgctgaggctttcaaacatgccggagcagatcttgaaacggaagtgaaggtaagatgggtttatagtggagatttaacttctgaaaatattaaagaaactttatccggagttagcggaattttggttgcaccaggttttggcgacagaggaattgaaggaaaagttcttacggctcaatatgcaagagaaaataaaattccgatgttgggaatttgtttaggaatgcagattatgacgattgaatttgcaagaaatgttttaggatacactaaagcgaactctatggaattcgatacttctacggagcatcctgtaatttctttaatggaagaacagaaaaatgttgtagataaaggaggaacaatgcgtcttggagcatggaagtgttccctgaaaaacggttctaaattaaacgaaatctacggagcaaaaaatattacagaaagacaccgtcacagatatgaattcaacagtgattacattggagaattcgagaaacacggttttttagcaacgggaacaaaccctgaaacaggattagttgaagcattggaaatgccggatcaccctttttatgtaggagttcagtatcacccggaatacaagagtacggttgcaacaccgcatcctttattcagagcttttattaaagcctgtacttcaaaataaagtaatttaaaaattacaaacgtcataaataaactcagactgattattctcagcctgagtttattatatagtaatgcattaaagaatagagttttgataaaaaaacagtatttttgtcgactcgaaaatgtgtagcattgctctgtaaattacagaatattattatacattatataaataggtaaaaattttaattaaagataaaatgcaacagaacaacggactcgataaaagtcagattattagttttgcggttttatgcttagttcttttcggcttcatgttttatttccaaaacaaacaatcgaaagaagatgcagtaaaagctcagcagcagaaaactgaacaggctaaaaatgccgtaaaacagactcaggcaaccaatatcaatccaaatgtaacttccggttcaattcagacggcaactctggcgaataatgaattgaaaattgaattcaacagtttaggagggcaggtttctaaagtggaacttgcaaaatacaaggcatacgatcataaaacagataatgcagatcttccgctttacctgatcacgaaaaataactccaactacggttttcagtttaaagatagaacagggaaaattattaatactaaagatttagtttttgctcctgttgtcaatggaaatgttgcgaccttaacggcgaattataatggtactgttattcagtttgtgtattcattaaataataatccaaaagcggaactgaaagatcaatatgctttagattttaaagtaagaactcagggacttgctaaaattacttctgataataaagcagattttatatgggattacagcgtaagaaaccttgagaagggtagagcgcaggaacagtctcactcagaattctcatatgctttcaataattataaagattatgagtacgatggaagaacaacgatggatgaagacaaagaaacgcttaactggattggagttaaacagcagttcttcgcttctgtaattgaatctaaaacaggatttacccaaagtaaaggaaatcaggaagccattgaagaaggagagtatctgaaaaaactaaactatgaaggttttgttcagatgaccggaagcgaactgaatcaggatttcacctggtactttatgcctttggatttaccattattaaaaacatatgataaaaactttgatgaaattcttcctctaggatggtctttcatcggatggatgaaccgttatttctttatgtggctttacagtataattgctggttggggattatctgcaggttgggtaattttcttaatgacaattattgtgaagttaatcttatcgccaattatgtacaaacagcacaaattaagcgcgatgatgagagtaatccgtccggaaattgatgaggtaaatgctaaattcaaggatgcagatccgatgaaaaagcagcaggctacgatggaggtttatcgaaaagcgggagttaatcagatggcgggatgtttgccggcgttggtgcaaattcctattttctatgcgttattccgtttcttcccgaactttattgatcttagaggtaaaggattctggtttgcaaaagatttaacggcttatgatgatttgataaaattgccttttaaagttccattccttggagaccatttaagtgttttcgctttggcttgtaccgtggtgatcttaatttacaccgtaatgacttcaggaaatatgcagcagccacaacaggaaggtatgccaaatatgaaggtcctaatgtacatcttcccggttaccttcttattcttcctgaatacttcagcatccggtctttcctggtattatttcgtatcgaatgcaattaacattttaataatccttgttattaaatatgtaattctggatgagaaaaagatacatgcgcagattcaggcgaataaggaaaagcctaaaacggaagggaagttccagaagagaatgagagaaatgatggagaaagctcaggagcagcaaaacgtgcaacagcagcagagaaagaaaaaataaaattttctataatacaaaaaaagagaggtaaatttaattttgcctctcttttttacttcaaatcttcaatattagtcatatttcaacctgaaagactgtctgtgatattttgtcggtccgaattttatcagcgcttcctgatgttttttagtggcatagccaaaatttgtgttccagccatattcgggatgctcttcatgaagttcgatcattaatttgtctctgtaattttttgctaaaatagaagccgcagcaatagacaagactttagaatctcctttaataatacattcgtgtggaataaaattgtaagggtgaaatctgtttccgtccactaaaatcaattcaggtcttattattaatttatccaaagcctgatgcatggcatggatacttgcattcagtatgttatgctgatctataaatgcgggagaaagttctgcaactgcgtaatctttaacattatctttgatgtagctgtcaagatccattcttatcttaaaatttaactttttggaatcattaaccaaattttggttaaaattttcatccaaaatcactgcggcagctactacaggtccggataaacagccacgacctacttcatcacaccctgcttcaacataaaaaaccgaccatttttttattaaatccataattttcgctatttcacccaagtaaaatcatgcaatattaaagatttttaacaaaatatttggttactttaagaaagttttacatatttgcaaataataaaaaataatcaatttaaatatgaagaaattaacagcaagtgttctacttgtagttttatcatcttcttttgctatggtaaaagcgcaaaatggtgatactctaagaacacagaagattgaagaagtagttgttactggcgcattgggtattaaaaagagagcagatgaatttactgctagtaataaagttgttggttctgcggaacttaatcaagcagctaaccctaatgctgctcaagctctaattggtaaagttggtggtttacagattaatacaacaaataattcagtagactcttcaactagaatagttttaagaggtccaagatctataactggtaataatcaagctttaattgtaattgataacgtaatatcaagttcagcagtattccagcagttgcctccggaaataattgaaaatgtaaacgttataaaaggtccagcaggatctgctttgtatggtgaaaaaggttcaaatggggtgataattgttaccactaagcgtggggcaaaatctgagaaaattcagtttaatataacatcttctgtagatatttcttctgtatataaattacctattacacaaaatagatatggtaatggaattcaagatgcaacatacggaagtcaagattatggaggaacaaattatgttccgtgggaaaatacctcttggggacctgcattttcttcttctttaggtggacaaatggttgcttccggactgccaaatgcagatggtacttttgtaatgactccttatcaatataataaagataacataggaaagttttttaagaatggggttattatgcagaatggtgtttcaatgaatgttggaggtcctgattcttatgcgttcttatccatcaacagaactgaaaatgatttcatggttgaaggcgataaacttaaaagaaattcaatcctttttaagggcggaaagaagtttgggaaattacgaattgatgggaattttaacttaattgatcaaagaacaacacagactgattctaatttatacgatgatttaattcaaacacctaatactgttaatgtaagagattttagggatagggggcttgaaggacattggacagcatatgcacagaatccatattggactatagcgaatgttagggataacagacaatctacttatttgaatgctatcattggtgttgaatatgcatttacagatcatattagcttatcatataatggtaaccttaatacttcagcttctactggtacaagttataataatggatttgcttttgaaactatttatgataatactggcacaggtatagacggtttaggattacatgattttggtcaaacggatataagatcaaattttttccaaagtactagcagaacaagaaattattacggagacttaatgttgaacttcaattatgagttatcaagtgattttggtttaaaggctaatttaggaaataatattcaggataactataatacatataatcaggttggaggatatgatcttcagactcctggattctataacattaataatgttttaactcctgagaaattttataatttatcaaacggattcattagaaatagatcttttgctgttttcgctaacgtggatttatcattcaaagattatttatttttaaatgcaacttacagatatgaaaaaagttctgtaacttcagattataaaattccagataataacagaggatattcttattattcagctgggctatcattcattgctaccaaagcattcccatcaattaaaaatgatatacttaactatgctaaattgacaggagcttatacaagaacaggaaatacatcaaatgttgctccttacgcaattgatcaaataggagttttccctacaggttacccatttaactccttatcttcatatatatttgcaacgtcgaaaacgtcaagagatgtaaaacctgaatatcctgaaacttttgaagcaggattaaatttaggtttatttaaagacaggatcactattgaggcttcagcttatcatactaaaacagctgatttgatcacattcggaaatgtttctaatgcgtctggtatcgcaagattgcaagataatgttggagatatgactaatagagggtttgatgttgatttaggattgattcctattaaaacttctgatttcgaatggagattgggaggatcatttaccacttataaaacaaaagttactgatttgggagaaggaattgatgaggttaacttgctaagttattcatccccggctgtaggtatttttgctataaagggacaagaaagccaaatgattaaaggtacaaaatatcaaagagatccaaatgggaatataattgttggtgcaaatggagtacctttgacaacttctacttttgaagtattaggaaaagtaaatcctgattatattattggaatgactacctcaattcggtataaaggctttacattatctggtgtagctgattacagaactggtaatagttttgtttcaattacaaaaagattattaggctttactggtggattagagaaaacggcagaatttgacagatcgcaaggatatatagttccaggttctgttcaaaacactggtactgctgcaaaccctatttatacacctaatactacacctgttttaggtcttaataattatactggagttactaactattttacaggtgcatatctttcaacaggtgaggaatttgtagtagatggaacagcattgaaagtaagagaaattgcacttagctataaaattccttcttcagtgctaagtaatacatttattaacagtatgacattgggagtttacgcaagaaatccttttgttatatatgcaaaagataatagaaactatgcagatccagaaacttcaagtacaacaggaaatgctgctggtgtagcacttacaggacagtatccgactgcgagaaactttggtttcaacattaatgtaactttttaaaaaaaattgaaaatgaaaaaatttaagataattgtatccttattgttaataggcgcaatgacgacatcttgtaatgattacttagatgtaaacgaaaaccctaaccaaattcacgaagatgcactttctcctcagttagtatttccaggagctgtttcacagatttacagaacacaagcaaacactatgatgcaattcggtaatgtgatgatgaatagctgggcaggtaattcttatgtttttggtagtccatttgcgaaagaatatacactgagtgctgttgataactctttttacaatggtatttggaatggaatttatctaaatgttaataactttgtatatatagaaaacattgctaatgctgatcataaatatgataactatgtagctatggcaaaaattatgaaagcttattatttacaaacaatagtagatttatacggagatataccatattcagaagctttcaaaggacaagataatcttactcccaaatatgataatgacgagacagtttatcaaagtttatataaaaatttagaagaagctacaacattaatacaagcaggaaaccctgcagctctggtgcctacttctgatgatattgtttttcaaggtaatatgaccaattggaattcatttgctaatagtgttaaattaagaatgttgctaagaatgagtaaagtaacaggcacaatggcaacatttagagatcaaaagttagcagccttgagttctgcaattaattcaggacaaagttttatatcagttgatgtattggagaatccaggttattcaccttcttcagatgataatatgaatccatttttcttaacttggagaataaactcagctgcaagtgctcctcaaaattatagcttaattacagtttctgagcatatggctgtatctttaaacggtaatccaaattcattttctgagtcttattatcagaaattcaatgctcttccagatccaagaagatctagattatttactaccgttgcttatacaggtttaccagcgggatctttgaaaggggtaagacaaggtgcaacacctggacagcctggtgctccttcagatcttacaacagtgtctagattagcgagtggtaacttttcaggtgcagctgcattatcgcttacttctggtaatagaggcggagttataatgtctttagctgagagtaaatttttacaagcggaagcagcacttagatatccttcattattttctggtgctcaaacagcattcaatgcaggaattaatgcttcagctgtatggctaggtcttactgctactaatatgacttcatatattaataatgccaatacaagaccaggacttggttggactggaactgatgctcaaaaacttgaggccattatgacacaaaaatggatagctttaactaacgttaatcctacagaaatgtttatagagtataatagaacaggtttcccaatcacaccattggctaccagtgcttctatgccgaataaaccttacagattaatttatcctgtttctgaatatgtaggaaattcagcaaatgttccaaacattactagcgcggaagcatttactaaaaattcaaaaactccattctggaatcaaaactaatcttttggtaagattataatacaaaaccgccttcgggcggtttttttatttccaagtgttaaaatttattttttctgaaaaataaatatatgtcacgcattatatttattttttattttaatagatattttttttaattaatattctaaataattcattatcagttattaaagatatttgttcataaagttttttagtttacttaatatcacttctttttttaataaataataaaatttgatgtaattattgttaatgatatttgttaattttattggttttaactttttttattaaattattttgatttattaatgagattatttgactgaatgttaaatttagctaattttattttgtactgaatataaaatttcacatatttgtgattagcaaatataatttgatatgaagaaattaacagcaggaatactaatactggtattatcctcatctctagctgtgtcaaatgctcagcaaaagaagaatgataccgtaagaacacaagaaattgaaggtgtggtcgtaactgcactcggtattaaaagagacaaaaaatcattaggttattctactcagcaaatcaaagctgatgcgattaccgacggtgtcaatacaggtaatattgccaatcagctagttggtaaagcagcaggtctgaatgtttcaacaacaaccaactttggaggttctgccaatattgtaatcagaggaaataaatcaattgtctctaataatcaggcattgatcgttattgatggggttcctattgacaacagaaataactttagcgagaggtatgactatggtaataacctttccgacatcaatcaggcagatatcgaaagtgttaacgttttgaaaggtgctgcagcttcggcactttatggtgagcgtgcaggaaatggagttatcttaattacaactaaaaaagggcgatcaagaaacggaagagtaggaattacactttcttctgaaatccaagtgggcgctattgatagaaatacttttgcaaaatatcaggataaatatggagccggttatggtcagtattttgatgaagacgcagctggtaatttatatgctcctttttatgatgacgcttctttagggaacgcatttaatcctaatttgatggtttaccagtgggattcctatgatcctaattctcctaattttggaaaagcgtatgcttggcaggctgcaaaacatactcccgcagatttttttgaaaccgctaccaattacgtaaatacagtaagtttagaatctggtaataatgattcaaatatcttggtgaattatacaaacttcctttcaaatggtgtacttccgaattccgagcagaaaaaaaatactatctctgcaaagttcaaccataaattcaatgataaatttgatgttacgacctatgcttcccttacattgcaggatactaaaggaagaaactctacgggatatggggataatattattacaggattcagacaatggtggcagaataacgtagatatttattctttaagagatgcctattctaattcaggaggacaaaatgttacatggaacagagtaagtgctgatgacggaagtccaaagtactggaataacccatattttgacagatatcagaattatcagaccgataaaagaaacagattctttggatatctgatgctgaattataaagtgactccggatttaaccatcacaggaagaatgtcatcagatacctacgatcagaaaaatgaaacaagaaagcaattaggaagtatgcctgaatccttcggattgtctggcaaatctgtttcttcgggatatgaacttgaaaatatccgttcttcagagattaactttgatgtgtatggtgcttataataaaaagtttgatgatttaagtgtaacagggttattagggactagttacagaagaaactacattgaagcggttagaaactctacagaaggaggattaattttaccaaacgtttgggcacttaacaacacggcagaagctccgttacctgcacaggaagatctggctaaaaatgtaacaatgggagcttatgcacaggcatcattaggttataaagatacttatttcgtagaaggttcttatcgtgtggataagtcttcaaatttagcgcagaacagtaatgtatatggttatccttcagtatctgcatcggtaattctatccaatcttattaatcaggattggctttcattcttaaagcttagaggaaattatgctaaagtaggtaagtctacagacaattacagattgttcgaccaatataccatcttaggtatttttggtaaaattcctatggtaagtgcaaatactgtgaaaaataaccctaatctaaagcctgaatcctcaaatgaatatgaatttggtttagaaggaagtttccttaaaaacagaataggttttgacgtggcttattacgacacccgtacaattaaccagattgttagagcagatgtttccaactcgacagggtatgcttctcaatggttgaatgcaggagaaatccaaaataaagggattgaagtatctttaaatttaactccctttaaatctaaaaatttctcttgggatatcaacttgaactggtctaaaaataagagcagtgtacttaagttaaccgaaggattagataatttattgctgcaaagtgtgcagggagaagtttcttataatgcatttgtaggacagcctttcggaattattaaaggaacagattatgtatacctgaatggtcagccggttgtagaagacggagtatatgctagagctgaagatcaggttattggaaatattaatccggattggattggtggtataagaaatacaatcagttataaaggagtaagtttaagcttcctgatcgatggacagaaaggtggagatattttctcaaccgacctttattatggtttaggaacgggaatttatccggaaaccgcttttccggacagaaacaatgttattttagcaggggtaaatcctgacggaactcctaatacaactccgattcctttagcagatacaggagaattgatgggaggaatttctgtaatgccggcaaaagcattcatctatgatgcttctttcatcaaattaagagaagcttctttaaccttcaatttaccaaaagactggtacagcggaacatttatcaacgatatgaagttttctatcatcggaagaaacctctggattattcacaagaacttaccttacgcagatccggaatcaggattgagagcaggtttactttcaagaggctattcagtaggagcaatgcctaccgtaagaactttcggatttaattttacagctaaattttaaaaaaaattcatgaaaaaaatatttttaattataggaagtgctttgttgatgttaacatcttgtgaagacatagaatctctaaacgtcgatccaaaagcacctgttgacaatccgccaagcggatatcttttctcatcaggcgtagttacaggactaaaccagatgaatactttgaatgttaacagaagtatattcagacatttaacacaacagcttgctgatgttacatacagagaaggaacaagatattctttcagaaggagagatgttgcagatgcacattggaatcagatattttatgctttaaattctcttaataaatctaaagaaattgttgctaaagaaacccttgatgctaaggtaaaggctaacagactggcaatgattgatgcaatgcaggtttatttctttcagattttggtagacagttacggaaatgttccgtattctcaggctttacagattgagcagtttctttctccaaaatatgatgacggaaaaacaatttaccaggagctgattaaaagaattaatacagacattagcgcattagacaacagtgcttccggatttggatccgatgatgtggtgtatggaggagatttggttaaatggagaaaattcatgaattctcttaagctaaaactgggaatgaatttagcagatgtagatgcatcacttgcaaaaagtacggtagaatcagcctacagtgcgggagttttttcttccaatacagacagcgcaatcattcagtaccagtcaacaggattgtttacctctcctttatatgaagatcttgtactttccggaagggtagatttctgtgcaacaaaccttattatcaactatctgaagaccaataatgatccgagaatttccaagtattttacaactgctttaagcggaccgaatgccggacaatatgtaggaggaacttttggattaaatccttctgcggctcagactttatctttaattaatccgtcaatatctgttgccaacggattggggtatttagcagattatgtagaaatagaatttttattggctgaggcagcagcaagaggatattctgtaggttcaatagcaactcactttgatgccggaatcggagcatctatggatcactggaaagttagcgctacagataaagctgcatatttagccacacacaattatgcagtacagtcaacaacaggtaatccttggaaaaaaattatcggggatgaagcttggattgcaatgtacaacagaggatttgaagcgtggacgttcaacagaagattagacaacagaacttatacgccgactccgcctgtaagagttttatatccaatcaaagaatactcaatcaacagttcaaatgtagcagctgcttccacagcaattggtggagacgagcagacgaccaaaatattttgggatgtaaattaatactcaaaatagttaatcattcatatttattccgccttcgggcggtttttttatttccgtatatttgcagtgcggaaaaagactcattcgttttttaaataacagacaatgaatattaaaaatataatagaagaaaaactttcggaggttattttaaatgtgtttcagttgaaagacattactctggaagttcaggaaaataaaacagaatttgaaggagatttcacgattgttactttccctttggtaaagcaattgaagaaaaaaccggaaagtatcggggtggaactgggagaagctttaacagagcagaccgatttactggaaagttttaatgtcgtaaaaggcttcctgaatattaaaatcagaaatcagtttttcgtagacaattttacatctgtttataatggtttcgacactatagaaaagaaaaatgcgacggttatggtagaatattcttctccaaataccaataagccgcttcacttaggtcacgtaagaaataacttattaggtttttccgttgctcagatcttgaaagaagcgggatatgatgtcattaaaacgcagatcatcaacgacagagggattcatatctgtaaatctatgctggcttgggagaaattcgggaacaacgaaactcctgaatctaccagtacaaaaggagatcatttcgtcggaaaatattatgtggagtttgataaggaattgaaaaatcagaccaatgcgatcttcaatgatttcagagtaaataaatttgatcagtttgacactcctaaaaaagaggaagttaaagcattaaacgaaaaaataaatacgcttgaagctaagaaaaaagaattgcttcagacagtagatatttctgaactttctgcattgcatgaagagttcgaaaaacagttcaaagaagctttaaataatgattctttgatttctgctgttcctaaaaaagttgaggaaatcatttctaagaagaataaaacagaagatatttcagacgaaaaagaactggaaaccattaaatcccagaccaaagtctttcagggtatttttaaagaagtattggaagctgaaggcaagctcgaagctgaaaagtccaatctgaaagagatctgtaaaccgataactgaaatcatgaaagaagcgcaacaaatgcttctggactgggaaaacggcgacgaaaaagtaagaaacctttggaacgagatgaactcttgggtgtacaaaggattcaacgaaacatacaacagattgggcgtagatttcgatcaggttcagtatgaaagcaacacctatattttaggaaaagaccttattcaggaaggtttggataaaggagtgctgtatcagaaggaagatggctctgtatggtgcgatcttaccgatgaaggtcttgatcagaaattactgcttcgttcagacggaacttccgtgtacatgacgcaggatttaggaactgcagtagaacgttttaagcagaatgatattcagaaactgatttataccgttggaaacgagcaggattaccatttccaggttttatttaaaattttaggaaaattaggatattcatgggcagaccagttgtatcatttgtcttacggaatggtggaacttccgaacggaaaaatgaaatcccgtgaaggaaccgtagtagatgcagatgatttaatgcaggaaatgtataaggaagctaaagcaattactactgaattaggaaaactggaaggtcttaccgacgaagaaaaagaagcttcttacgaaattatcgggcaggctgcgttaaaatatttcatgctgaaagttgatcctaagaaaaaaatgctgttcaatccggatgaaagtgtagaatttgcagggaatacaggacctttcgttttatatacttatgcacgtattcaatcggtattatctaaagctaattttgaatttaaaacgacttcagatctggctttgaatgaatatgaaaaagaacttattatgcttttgtccaattataaaggtacggtagagaaagcagcagaattattaagtccggcgttcattgccaattatgtgtatgatttggtaaaagcttacaattcattctatcagagcaatccgattatcagtcaggaagacgaaaatctgaaacagttccgattgaatttatcagatcttacggcaaaaaccataaaaaaatcattgagtttactcggaataaaaaccgtaaacaaaatgtaaaaataaaaccttcagaacgctctgaaggttttttattttaagctttttcagcattcattttctcttttaaactgtcttcatacaatttcgcatcgctccattttgcgtgtttcgatggtaaaatggtatatccttttttataggcgtaaactttcgtgtattctgcgccaaagaaaatcagcatacaggaataattaatccacatcatgatcaggatcacggttcctgcagctccgaaagcggaagtaggtttcgtagttccgaaataaagactcagtaaaaatttacccagagtaaacaatattgccgttagaaaagctccgttccacaccggtttccaacgcattcttacatcaggaagaattttaaacatcaatgcaaaaagcaacatgacaatgacaaaaccgatcacaaaattcaccaactgaacaatcagataggtttccatcccaaaataattcgtaatccagttattcagaatgctgatcattgaagaaagcaccatcgtaatcatcagtaaaaaaccaataatcagaatcattcccaaagagttggctctgtccattaaaaatttaacgaatgctttcttaggagttgcctgaacatcccacaaattattaagcgagtgctgaagctgaaagaacagggtagtggaaccaaaaaccaacgaaccgactcccacagctttcataaaaatattttctttgtcaattaaagctcctgcaatcatatcctgaatgctttttgcaacatcctgtcccataattccgctgatctgattggtaatttctccgcgaatagcttcctcaccaaagaaagatcctgcaatccagatgatgataattaaaagcccgggaattgaaaaaatagcgtaataggcaagacttgcggcatcacttgaagccgaagaattattccattgtctgaatgattcttttaacgtttcccagaaaaattttaattgttcgatcattgatggtttggtttagaaaggatatccgatggctatattcagaataagattatcttttctccagctcgaatctccgaaattaattttatcaaatgtccatctttcacccctttcataataaggaacgcgcaatggcatggcaagatccagtctcaggatcaggatagagaaatcaagtctcagaccaaaacctgcacctacagccatttcgcttaaaaattctttagaaaatttcgctcccggtctttgaggatcatcattaatcagccatacatttccggcatcggcaaacacggcaacatttaaaaatttatacagattggctctgtattccgcattcagttccagctttacgtctcctgactgatcaaaataatagccgggtttaatggttctcggatcaaaacttcccggtcctaaagttcttgcacggaaggctctcacactgttgcttcctccggagaaaaactgtctggaaaaaggaatatactccgaatttccataaggataggcaactcccgcaatggctctcgtcgccagagaagttttttcattgaatttatgatagaatctgaaatcattttcaattttggcaaactgactgaacggaacaccgaaaatttttctttctttatctttttcaacattggctcctgtaatcaaaccggttaaatttcctgcaagatccaaagttcctttataataaaaagtattcggcttctgaagcatcgtgttggtatacgtataggaataaatcggtccgaatatcaactgaggttttaccactctttctaaagcatcgttattttgagaaattgaatcgtaaagaggagtaatatttgccggagaaacataagtgatgtcaaaaatcttcagatcatgttcttttcgtgcgttttctttccaattgtacccgaaagatcccgtaaacgtattgagggaataatattctgtcctgttctggaattcatagccaaccgaaatattggttctcggaacaaacgcgctcgaagaattaaacctgaaaggtgcaacaattctaggaatcgaaagctgagcattcgctcccattctgaaaatatttttcgcattttcgggacctccgatctggaaatcaaaagcaccgtacacagaagctttaaactgttcggcgccgcggaaaaaattacggtgggtccagttaagattcacttcacttccggcgtagtttgcagaattggttcttcccaaagcttccagacgaagcgactgaagctctctcggagtcagaagataatacgtatcaaatttatgctgtaaagaatcagaaacaatgaattcatttttcacaaatttgaagacaccaagactgatgagcctgttaagcgtaagattatgattcgttctgttgtacagatccccttttttaaaatataatgccctgtcgaaaatttttggtttaaatttattctgaggatcgataacgtagatatcgccgtgttcatatttctgaagcgaatctgtgttcatcgggatcgaatattttccctgtttcacatcctgaatactgtaattcgggaaaacaattactttatcaatgctgaattgttgcgtagacagatccggagtattatccttcagcttcacattcagttccaccttgtggtttttgcttaccgtactgtctgcctgaacaataagattatcgggatggaaataataaaaccctctttctttcagtcggttatctattctttctctttcagattttatcacatccagatcaaaaggatttccctgcttcaaaagcgtgttgtctttcagattctggatttcctgattcaccagtgaagaatctttctggaattttacattgctgatcagatatcttgctcccggttttaaagtgtaaattaccttggcttttttatttttggcaaccgtatcataggtagctcttgcattgaaatatcctttgttttcagaataattaacaatgatatctttattgaattcgcggtctacatcacccagcaaaacaggtttttctcccactttatatttcagccagtaattgaagcctttttcttttttcggctctttggcaatattataaaaatacagtttaggtcttaatcctaaaaatgaagagttcggtttgggagtcagcttatcctgaagtgcgctttgaagatctttcttttcctttttcggcaaagtgtcgttttcaatcttcacttccgcacccgtgtaaagcatctgtccttccttcagaaatcttgtattgctgcaggaaagcgttgcagaagccattccgcaggtgattaaaaatttaaaataggtctgataactttttttcatttacttaaattctacaacttggttttgttggttttttctggattccttctgctttctgtttttagatttctggaaaatatcgcggaacttgtcataatccaaagtgatgataaatcctacgcctgtttccacgatctgcccctgaagcgcaacctgatattcgttcttacggtatgcgcgaagcatatatcttccgtctctggaaaggctgtaatccaccgttacgtctcctgcgatattcgtcatgttttcattttgccgcgcttctccttccagtgcaaaattacttcctacagaaactttcagacggtcgttcagtaattttttacttaaccctacattcaggtctgttctcgtatttttagatcctgtagaataatcttcagaagattcaagatcaaaattaagatctactcctttaatgagatccgaggcaagattatttaactgttgggaaagaattttactcacactctgtcttgccagcatttctcccgaaactcccgctccggattcaaaaggattttccccgataaatctgttaagaagaagaagggcaaaaacctgtttattcatttcagattcctgagttctcaactgggcaagcttctgatctacaatatctgtaaccgtggaagaaaccgcgttatttttttcgtctgtggtaatatcaaaagtaattacaggttttagcagttcgcctttcattttcagtaacgtgctgaaaggaattctctgcttaaactgattgagtgtggaagcctgttctccgctgatctgctgttccacaagatcaattggggcggcttcggttttatagacggcggtgatatccagatttgccgttgtcggttctccggtccatgtaatcgtacttcctttctgaatatcaaatttacgtttcagaatacttaccgtcatttcataacttccggattccacttcataaactccgacaagggtagtttttccggacggatcaattccgcccgttaattccgcttccccctgaagttttacaaaatctccgttggctttgtcaatcagcaaagacatttttgctttcttactgatttcgatgttcacacttacgtccattcccttaattttgctctgggaatttaaagaatctgctttcacggttttgtttaaaacaacctgatcctgatcgataaattctacaattccgtctctttcctgaagcgtaggagaagactgaggaagcacaaaagtaaagtcggtgttgtctgcaacagccagtcttccgtccaccttcggcaaatctaaatttccgcggatgtgtaatcctgcatcaatagagagaacgccgtacataatggcatcgttggatttttcagaattcactactttgaaattctgtgcatctacatcaagattaaaggcaaaatctctgtatgtctgtgtaagaacctgtccgtccactctaagcgcatttccgtctttatctttaattttaaaattatcaaactcaattccgcggttggtaaagcttatttcgtcattcagttttctgaaatcacttcctgttttggcaatttccagccctacatcattgaattttactttacctaaaatattcggtttggatgctgttcctgtaatcttcaggtttccggaaagatatccttccgtattggtaatcgcattcatcgagaatccctgtacagatttcatttgaagctgattgattgccatattcatatcaaatgtgctggaagaagtattgtaatctcccagaattttcacatcgttgttatttccggaaagcgcaatatccgcattcagtagattcggagcattattattgacttttacggcaagatttcctaccggatttccgtagacaatcagatcagatacattaagatctgaagtgaaggtcatatttttcgtaatatttttaagctgagccgttccgttgatggttcctcttgccaaaatcgtatcttttttaattaattcggtaatggtttcaatcttaaaatccttcagagaaacattcagcggagcattcggagtctggctttcagattgtaaggcaatttcgcttcccgcgttggaaagtctgaaattatctgcgagaattccgtttttgccgatctgtattttatttccttcggaaaccgtccagtcagaataatttaattttaaaccattcggatttaaagaaatttccgtgatgtcgttcagtgattttgcatttccggcaatcaggaactgggtaacctctttctggtctttcgtggtgatgttataattgatgatattgttggcaacatcccctgtaattcctactttattcagtgcgaagctggagctttttaaccctgcaacataaagattatattgcaaagcattattttcgttcgttacttttatggtggcatcttcaatggaattttcaccgtaaagaacctgcggaatctgtccgtcgatctcaattttctgagaatctgcgtcgtaatttccatttacattaatcgtttcaaaacttttcagttccgggacaaattttctgatcagatcatcatttttaatttttgcattgaaggtgaaaaactgtcctgcctgaattttctgtgcttttccgggcttttgaaactgataatattggttgactgtattcgataaagcaccgaaaatctgcgtcagtttatattttccttttaattcgacatctgcaatctgggaattgaacataattttggtggaatctgcggttgaagacgcttttaaattcacttcctgaatcgggtacacttctttggtatccgaaaaggcaaagtcttttaaattcagataaccgttcagattgtcgggatcgagattagaaaaatctccgtctatttttccggcaagaatcatcggatctttatagaatcccaatttgttgaggtctaattttatgacttctccgtttacttttaccgtcggatttttttcgttgtacactccggaagcggttaacatcatgttcgcattcggatcttttgaatttaaaacaacgttatacactccgcggcggatttttccggtaaggttcatgttctgataacggtatcctttgtaaacagccgaagcaacatgacctttaagatctgcattggcatttttaaaatcgaaactttctcctttcgcataaatctgtgcagaaatggctccgatctctttattctggatgattttccccaactgaagtccctgaagattggcttttacatcatacagttccctgttttttctgcgcatatccacatttgccttaacggaagcatttccaagcgtagagtagaggttaaggtctgttgtaaccactttcgtagttccttttgcgattcctttgatgctgaaattggaaggcagcgaaatatttttcggaattgtatttttgggaaccagattgtaaatggtttttgctgatgaagataattctgcaattttcagatcataatacaactgatctggattcattgcatttttcactcttccggatgcggcaacccgtagctgatcgagacctgaaactttcagattattaatcaataaatcattgacgcttccttttacattggcattaatatttaaaaccgcattgggatatttgttgaaaggcgtggtatttcttaaggtcggaacaatattcagaatatccgaaaatccgatctttgaatccttgatattggctgaaatctgtacggctcctaaatttgagcttaactgttctattgaattgtaatttaatacgacctcatcgcgaagaatggttttcggtgtctgcaaataaagatcttttaaataagcctgtttatcattatacacaaaatctgtattgaatttctgaatatccattcctcttgcttccttaatttctgcggaatttacgtttcctgcaaaagtattgtcgtgcattttgaaacttctgacttcaagattgagtttggaaaaattcaggtgattgaaatccattccctgtttggtaggagcaatcgcggtattgttgtaggcaacttttacgtcatttaaaacaaattttcctaaaagaagactgagtgctttttctttttccgaaggttttgaagcttccggctccgttttcggattggcatttttcgcaggaagatataaattggcgttaatatcggctccggaaaggaaaacattatccacattgtaggcattattttccagatcaagtttattcactttcgtgcttaattctttaaataaaactttagcgaaagttttggtattgtcatctccgtaatcgatgttgaaattagtgagtttaattcctcttaagccaatctgcatgggctttttgttattaagagaatcgacttttttctctacttttttggaaacttcttctacaagatcctgcttcagtttcagttttaagccgtctaaattgatgtcgtttacggcgtaagaattcttctgaagatcaaatgtttttactcttgtatcaaaagatttaaagtaaagctgaatatcatttctggattgctgatcgttgaaggtaacaccgatgtctttcagattgattttatctaaagaaataatgaacggtttggacgcactttcttccttatcgcttgttgcaaaagcatccagaatataatcgaagttaaattttccgtcgggttttctcactacattggctcttgctccttccagatctacagaggtaatatctgcggtggaattgatgagtttaagcatatttaaacctacatccagtttttttaccgccaaaagggtgtcgatatcctgacctttcagataaaggttttccatcacaagactgttggggaagccgacgtagactctttcgagactaacttttgttttgatttttttctccagataaacaaccagtttgtctttgataaagttctgaacaacaggaagtcttaaactaagtactaataacgaaaaaaataccagtatggatataatggtaattgcaaaacgcttgaagagttttcttttattgattttcagtttcaaaagtgatcgggtttataacaaatataacaatacttaccgtactgttactatgttgtggtacactttttcttaatacaaaaaccctgcctcgactgccaattatggaatttagtttagtttattgtcaagtgaatagttgaaaatggcagtcaaggctcgggtttgaattgtttaaaaagcccccttcttaatcattttttctgttgaaaaggtttagcaaaaatgaaaattcaaaatgtttagttagtgtatggatagggggcttggcatggtttaagtgttgagataattattttttattcgtttccgttctcccattttacctgttcgccttgtggggcagcaccgccctgagccggagtaataggaggggtttcctgattgatatgataaatataggctgcaattttttcggcatctcttccggtaatggttccttctttaattaaaggtctcatcgtaggattgttgggagagccgttttccagcatccagattacgtttttaaacaggcttttctgttgtacattaatccagtgtgtgtctgtaaggtttggtccgattccgccttttccgttttctccgtggcaggttacgcagtttgttttaaataattcctgaccttccgcaatattgtctgcactgtattttgcagtttccagtgttacctggggggcggttttttcaaactcggcaatagaagcaagcattgttttggtttctgcattcagttctgcatccggatgcgcataatctgtaaaggtaaaagcaattagatataccgcacagaaaatacaaccaaagtagaataatccgatccaccatttcggaagagaattatctagctccgtaattccgtcgaatccgtgatcgataagaatatctttttcctctgttgcagactgttttttgaatgccgaattccagagtttctgaaagtaaggtgtatttttatctttaatataggctgctttttcttcgtcagataatttcttaaaattttcaccttcaattaaatctccgatggaattcataatcaggagaagaataatggcaataagcattaatccccagaaaaaaggtgaagaaaaatatcctgaatcgtgcgcgaacatttcgaacgccataatcgttaaacctactgttacgagaatgtagattgaaatcggggttcttgttttcatgtcaatttaatttaaattattctgcacttgcagtttgaatctgagtggttttgatgtctgttcctaatctttgcagataagcaatcatggctacgatttctcttttttccagcggaacgaatgaagctccttttgcagcacggtctttttccacctgatctttcacgtctttcgcttcagaataaattcttttcacaataccatttgcctgattgtctgcccattggtttgcggaatctatttctgcttttgaataaggaacgtcaaagtaatttttcattaatttcatcttgtctaccgtctttgttctgtccagtgtattgctaatcagccaagggaaacgaggcatgatagaacccgctgaggtaattcttggattatacatatgtttgaaatgccatgaatccgggtttcttccgccttctctctgcagatccggtcctgttcttttagatccccaaaggaatggtctgtcgtaaacaaattctcctgctttggaatactgtccgtttttaccttcaaatcttacaatctcatcacggaaagggcggatcatctgtgagtgacaggcgttacagccttcgcggatgtataaatctcttccttccagttccaatggtgagtaaggttttactgcggtaatggtaggaacactctgttttaaggttaatgtcggaataatttctaccaaacctccgatggctacggtaatgaaagccaatattgccataactctcggggttctttcgatccataagtgtattccttcgccttcttttctcgctgatccgatatttgccagtgccggagcttctgccggaacgtttttctggaaagatcctgctctgacagttttaataacattcaccaccattaaaatggctcctgaaatatagaacagccctcctaagaatctcattttatagtaaggaataattgctgttacggtatccagccagtttttccaaactaaagttccgtcaggattgaactgtttccacattaatccctgagtaaatcctgaaatatacatcggaacggcgtagaaaataattcctaaagttcccagccagaaatgccagttggctagttttctggaccaaagctgtgttctccacattacaggaatcagataataaacgataccgaaagccatgaaaccattccatcctaatgctccgatgtgtacgtgaccgataacccagtctgtatagtgcccaattttatttaaagattttgttgctaaaagcggaccttcaaaggttgccataccgtagcatgttaccgcaacgacgaagaattttaagataggattttctcttactttatcccatgctcctctcaaagtcagcaatccgttcagcattcctccccaagacggagcgatcagcatgatggagaaacctgttcccaccgcctgcgcccaagctggaagcgccgtgtattgtaaatggtgtggtcctgcccaaaggtaaacgaagatcagagaccagaagtgaataatggataatttgtatgaaaatacaggtcggtctgccgcttttggtaagaaataatacattaaaccaagaaccggagttgtgagtacgaacgctaccgcattatgaccgtaccaccactgaaccaaagcatctttagctcctgcgtagatggaataagatttccaagtggtgaaagataatggaacttcaaggttattgaagatatgaagcattgctacggcaagccaagttcccatataaaaccagatggctacatataaatgtcgtactcttcttttggcaatagttccgaacatattgatcccgaaaataacccatgaaatggtaattaaaatatcaatcggccattcgtgttctgcatattcttttgaggtattgattcccattaggaatgtaattaccacagaaacaatcatgatctgccatgtccagaaatgaatccatgataaggtgtcgctgtacattcttgttttaagaagtctctgcatactgtaatatgcaccgcagaaaaaggaattacagacgaaagcgaaaattacagcactcgtatgcagcattctgattctcccgaaacctaaagctccctgagtattaataagtccctgaatatttccagatactaaacttttaatcgttgtatcatcggttccgaataaaaattccggaagctcaggataaaaaagcatcagcgcagcagtaagcccgagtaaaaaacccaccaaaccgaatgcgattgtagcatagaggaatgctctgacaatattattgtcataattaaatttttgcgtctccataattcctattgtgttgtactgaagttgatatttttctattaaagcctaattctacaaacaaattttaaggtaatatttaaatatcatgtagtgtaataatgttttgacaaaggtatttactaactttgtgtaagtctaatagatatacttctaaaatataccgaaaactactaaaaccaagagagatgaaaatatgcggacaaaatatcaggaaaataagacgaagtaaagattttactcaggaatatatggcttttgagatgggaatttctcagaaagcctattctgatattgaaaattccaaagtgaagattaatctggaaatccttaccaaaatttctgatattttagaaattaaaccttctgatatttgcagtatttcagataaatgcggtaatggttttgaggataagtataatgatctggtagaatacatgaaaaacaacggaattgaagttcctaaagagtatttataaatattgttagatataaaatcgaaaaggctgcttcttttggggcagtcttttatttttaaaacaaattaaaaacggagaaaataaaaatttattaaaaataacgaagcttaaattctgaaaaaacagaaacaaaaaaccacccttaaaaaggatggtttttgtagactcacagggattcgaaccccagatgactgaaccaaaatcagtagtgttaccgctacaccatgagtctctgtttgttttagtggtgcaaatttacagctttttttattacatacaagaaaattttaaacttttttttaaatttactgtatattttattcacggaaatgatgcagatagacttcaagaatctcaatattaatcaattatcctttgaaacggaattcgaaatcaaggtgaagaattttctggaagaatggttctcggattctgatacggtaaaagtacagacttccggttctacgggaactcccaaagtttttgatattgaaaaaagcagaatgataaattcggcagagatgacctgtaattttttgggactgaaaaaaggagatactgctttaatctgtcttcctgtcgaatatatttccgggaaaatgatgatggttcgttcgatgatcagaaaattaaagttaattgttgttgatccttcgattagccctgctgaaacattgaatcagaaaatcgatttctgtgccatgactccgcttcaggtggaaaattctttagataaactgtacctgattaaaaatctcatcattggcggagctgccgtttctgaagatctgaaaaagaaaatgaaggaagctcttaaaacttcagactctgaaacatttattttcgaaacctacggaatgtccgaaacactttctcatattgggctaaaacagattttaccgaatcctgaagaatattttacggtttttgaaaatgtagaaatatctttggacgaaagaaactgtctgagaatttttgctccaaaattaaatcctgacatccttcaaacgaatgatttagttgaaattaaaaatggaaaacagtttaaattcctcgggagaattgacaatgttatcaattcaggcggtgcaaaaatatttcctgaacagttggaagctttggtaaaaaaagaaattccgaatgaagtgatttttttaggaattgatgatgtaagtctcagtcaaaaattaattacagtaattgaaggcgaaaaatcggatgatttaattaaaaaaataaaagaaattcagtttgaaaaaagttttcacaagccgaaagaaattgtttttgttgaaaaaattccgagaacgcccaatggaaaaattaatagaattgaactgaaaaaacttttaaacaacaccatttagaaaatgaaagattttaccaaagaactaagctttaaaacttcccgcagcagcggagcaggaggacagaatttgaataaggtggaaacttccgtaacggttctttggaatgttcaggaatccggattttttaatgaatttcagaaaaatcttattcaggaaaaactcaggaacaggattaatgcggaaggatttttatttttaaccgtttcagaaagcagaacgcagcttgccaataaaaataaagcgacggataagatccttgaaatcgtgaataaagctttggttgtacctaaaaagcgtcttgccacaaaaccttcaaaagctcagaagcaaaaaagattagacacgaaaaagaaattatcagataaaaaagagaatcggaagtttaaatattaattcagttctaaaaatttcccatatatcgtaaagtaacattggatttcgtattctgatccggaataatcaccagattccctgtctgatcggtgtctctgtacgttctgatgattttcattgataaacggtcgttcgcattcagtttcaaaacaccggtagcatttatcgcaatggaatataatccaatcggaaagctttttgttccttcaagatcaaaatttatgggattattggcggatgcagtgactccgtttacatagattttcatatcaagctgttctcttttaagatcgtttccattgttctttttgatgaaagaagctgcctgtatatggtaatatcccgctttttttaccacaagttctccggaagtgttgatctcaaaattagaagcatcattggtggtgaaatcttcaaaatctaaagttctgtcgttggaagaacccaactcggtcatatttccttctttgaaggtattttttgttgtggcatacaaaatagatttgttgctggaaaccctgcttaaagacaaaaatcgtttccattctgttccgttccaccagtaaaatcctttttgggcagcgtcggcagaattcagaaaaaccataagacctttttctttgatatccgttgtatttaaagcatttactctcgggataataacaccggaaatacccgaaggatttgcctgattgtcgggcttaacatccagtgtggatttgggagccggattattgattcctatctgagccgttactttacctgtacataaaaatgcaagggcgaaaaaaaatatggagagcttattcatggtgctgcttagtttaaattaatgatggttaaagtatatggagtatcaacacttacagtattggcggcagttgtagttcttgttgtttttacagttaaaatatcatccttatttaaagaaaagatggttgcaatataaaaagtagaagatcttccaacggtatctcctcccggagctgtattggttgaggtaagctgcgtatttgaaactccgttaattaaaatctctgtgatgtattcattcacattatttacggcatctttataaacgcctcctgtaagaaaaatataataagttgccgttttcccgattttcagacctccgttgctaaggctgaaactgggatccagactgttgattgtggtcagaggaattgttctggactgtacaccgtttccgctcatattattcggagaaaaagaacttccggaagcaatggttttggaaacatccagtccggcagctttaagatccatgatatattcccaattgcttttcgcatgatcccaataataaaatccttccaaattagaatctgtagtatttctaagatagattaacattccgtcctgattggaggaaggcgatgttgtgggaaacttatccactaccggaactcccaaaccaacggtagactctggtaatattttatttttagcatcaagatgtaaactggctttaggattggtgttattgattcctatctgagattttatcaatattccggcaagaagaaaaagagattgaagcagtatttttttcatgattcttagttttgtataaaaaataaagtcagattattaattccgaatgcctgataattattgggaccttcgttcgactttgttacggtggctgttaaattatcccccacatttaatcttcttaaaaatgaaaaagcggtacttacggaagcggtggattctgccgccatcgaagtctgaacagaagacgcctgaactccgtttaccagaactgaaaaagtaaaattggcatgctcttccgctccggaaggtttcttactgtttcctgtaaaagaaataagatacaatcccgcttttcccactgtaatcgtattgttgtttaatgtaaacccgtctgtagtggcttttatatacctcgaaaaattaatatttcttgataatgccgttcctgtatagccttgtccgtcaaaagaatatatggtattgtctgcgtttctgtcgatggattccggaaatgaaacccaactggaaccatcccagtaataaaatccgtcggcaagagtagcattattttctaaaaaaataaattgtcccagtcttgaaggatttacggaaggaagattttgtactttgggtactataattccgtctttgcctgtaggacttactgaagaagaaggttctatatgcagtgtggctgcaggattttttgtattgatgcctacttgcgcatagaacggcaaagaaaaaaacaaggcaacacatcctgaaagtatgttttttttcattcttattagtttttaaaattttatacaaaatttcaaatggtaacggataacggtattaaataattttagttcgctgttaattgaaccgttcaaaattaagttaaaaaattgataataatgattattttattgaaaaattgttaaataattttttatgatagataatttattttgttttttcaattattgtagaaatattcataattctggtaatcgcacagtggcattggttttttgcaaagtttttaatattcaatgcatagaattaaaaagaaagatattccattttataacctttcaggtttatggttttctttatatattgcggcgaattttcagaaagtaatttagagatctccaattcttaaatattaaataaatttttaaactaatgatcaaaaaactattcgcattgggattattctcaatctcagtattttcttttgcgcaaaaagtttctatttctccatcggtaggttatgcgtggagactggcaaaaactccggacaatattccgagagatcagaaagaatacatcaaaggaattaaaagcggtcttaatttcgatgttgcattgcgctacgaagtaaaaaaaggacttcttatcgggttcaaatattccaactacagtgcttctacaagcggaagattaagtattgcagacaatatgggaaatattgtttcggcaaatgtaagtacaaaagaccagattaatttttacggtccggaacttacgttaactaatgatgctcacgaaacaaagcacaaactgtttatggatgtggctttaggagcaatgacctacaccacaaaaacaggaacggtaaaaggaaaaggaacaacattcggagcggaactggattttgcctatcagtatgaagtaagcaagaactttttaatcggtccgaaaatcggactttccggaggaacccttagcaaaatgagctttaacggacagtcggtagaattcggagaagaccaaaaagaaggtttaacgagactttctttaagtgcagccgctacattccgtttttaagttttatctttgcaaaaattataaaaaatgagcaaaccgataactgagttcatagaaaagtactacctgcacttcaacgcagctgcattggtggatgcttctaagggatatgttgcacatcttaaggatggcggaaaaatgatgattactcttgccggagcaatgtctactgcggagttggggaaaattcttgcagagatgatccgtcaggacaaagtagatttcatttcttgtacaggggcaaaccttgaagaagatttaatgaatcttgtagcacattctcactatgaaagagttcctcactacagagatcttacgccacaggaagaatgggatcttctggaaagaggtctgaacagggttacagatacgtgtattcctgaagaagaagctttcagaagattacagaaacatatctatgaaatctggaaagatgcagatgataaaggagaaagatatttcccgcacgaatatatgtacaaaatgatcctttccggagttttggaacagtattatgaaatcccgagagaaaactcatggatgatcgcagcggcggagaaaaatttgccgattgtagttccgggatgggaagattctacaatgggtaatattttcgcatcttactgcatcaaaggagaacttaaattctctacgatgaaatcagggatcgagtatatggcttatttagcagactggtacactaaaaattcatcaggaaaaggagtaggtttcttccagattggaggaggtattgccggagatttcccgatctgtgtggttccgatgctgtatcaggatatggaaatgcatgacattccgttctggtcttatttctgtcagatttcagattcaacgacttcttacggttcttattccggagcagttccgaacgagaaaattacctggggtaaactggatatcacaacaccgaaattcatcgttgaaagtgatgcaaccatttgtgcaccattaatgttctcttatattttagaaaattcttaatcagaataatataaatttacataaaaggcttattttgtaagccttttatttttttaagtaaacataactcataatttttttagaaatacatttttaaaattcacagaaatactgttctattaataccgcaaagtgttgttttaagatattttcatcttttataagcgaagcggctttgtgaaccaaagaatagttgtaggtaaaataaaaactctttgaacttcgtgttcagaaaatcgatacactaaaatatatttattctaattggaagcttttcaaaaaaataaattcgatgctttaacaggaatgcgcgctgttgcggcgattatggtatttgtatatcataaccgtaaatattggcgtaatgatcttccctttggaatcatgcgtttcatcagcgaatggcatatcggagtaaccgttttctttgtcctgagcggatttttactcgcttatcgttatgaagaaaaacctctggaatccaaaaaatcttatttaaaatacattttactgcggatcgccagaatttttcccctgtactggattttgctgagcgctttttttctggatgtaaaatattccaaagaagtagatacatatttcttacagtactcgcttttttactctttatttgaaaaatactctgtctcaggaatcgttcaggcttggtcgcttacggtagaatttttcttttatcttctcgctccgtttttatttcttttgcttaaaaaaaactggagctactgtattctttttttagccggattttttcttgtaggttggggaatcggttatggtctgcatgaatataatggaaatccagaaggctttttatatcctctgaaattcatgacaggaagcacgtttttcggaagaagttctgagtttttcttcggaatgttgcttgcttatgtaatgaagaaagagaaaggtattcagtttttaaaaaaaataaaacggtctactttaatgggcggtatttcaattattctgttaatcattgccattgcattttttgcccggaataactttgttcacggagtagagcgatgggagggaagactgattcacgaatttttgcttccggttgcaatcattattttcttttggggattgatgtctgaaaaaacatggatttcaaagtttctttcttcaaaactattgattcttttgggaaatgcctcatttgttttttacctgatccatttgagttatttcaatatgaaactcaaatctttcgtttatcttcccgacagaaattttgtcctgttgtggatttgttcaatcgttatttatctgctgattgagaaacctctctatgaaaaatgcagaaaattaattgctaaaattaaataaaacttttctcagtataatccatcgaatttatcagtacaaaataacggtaggcaagaattcctttctgaatttttgtcagtttgcttggatctttatcacttaatttgggtaaaattgccttatttattctattcaaaaagcgaaagaacgattttttcataactttatattttacagattgaatttcaatggtcaattcaaaaataatgcaaaacaaaaatggacgaaatatttaaaaagcaggtttgggaaatcactaagttagttccgaaaggcagagtaacgagttacggagcaattgccaaagcagtgggctatcccaatcattcccgccacgttggaaaagcaatgggaggttgtcctaaagatgttcctgcgcatcgcgtaatttcaagttcaggaactttatcggttccggaatttcaggaaagactggaagcagaaggaattactgtggaaaatttccggattaaaaatttcaaaaacctgttctggaatccgctggaagaactgtaaaaacagaatatttaccattcagaagacaaaaattacggctgagtctgtttttttggcgaaagacttttgtaaaggctagttttgctttataaataatacgctatgaaaacaaaacttctattctccgcactttttttaatgacagtctgcttttttaaagcacagatggacgataatttctacaagccgggcaagacgcttcgtcctgtagaaaatctggtttatgaagatttttccattccggtggaaaaagatactattacaggaattattttaaagccaaaatcgggaaaagcaaaagggacggttttattctttcacggagcaggaggaaatgttacgacctatttattcatgacgaaacctttggttgaaaataattttcaggtagtgatggtagatttccgtgggtatggaaaatcaacaggcaaaccgactcacgttaatatcgcatcagacgggcagattttctttaatgcgatgattcaaagacccgacattgccaatacaaaaattattctgtacggagcttccatgggatcgcagattgctgcccatttagcccgaaataataaaactaaaattgcaggactggtgatggacggaagcctttcttctttcacagatattgcaatgtattacaaacctgaacttaaggaagtgatttcccaatacgttgtttcgccgtattctgccaaagaagatttacaggatacagaaggtctttccaaactttttatccacagtaaagaagataaagaggttccttattcggaaggatttgagaattataccaaggcttctttgccaaaagagtttttggaatattccggaaatcatctggaagccatgaatactcaggctgaaaaaattgtttcggctattgataagatgctcaataaataacgtgaactcgacgctaaaatattgaattatatttagttgtccttggcatctatgcatttatccagttcgggaaatttaccgatggtttttccggataaaaacaataggcgcatatggcagagannnnnnnnnnnnnnnnnnnnnnnnnnnnnnnnnnnnnnnnnnnnnnnnnnnnnnnnnnnnnnnnnnnnnnnnnnnnnnnnnnnnnnnnnnnnnnnnnnnngtagtagcgtacaaggctgtggtagtccttaacctctttgtacacacggtcaattacatccatacgctccttgtcattcagcgagaggtttgtagcagttacaatctgcttcaactctttcaggagttcggtactttcattgagcagtgccgaatacccattgccgattgccaccaattcctgcggtgtgaaatttgggtcgttcatcattttgccgaaattctgaacgtacatttcggacacatcgcccaccagtagtacggtttgctgcaccttacgggcatcttttacgagattactcacagctttcagcttgtcgtaatattctttgccctgctcgtacactttcttcacttcgttgaagtttttaacgacattgctcacagtcgaagaagtctgcacgatttcgtttgcagagttgataatccctgaagccaaattagcggggtcggttacaacccactgggcttttgctgacggtgctacggcgagcatcagtgccgtacacaccagatacaatacttttttcattgttctgaattttaaaatgttaatgactattgatttgaattgtcccgccgttgcattgcgatatgcttaatggcgagttctacgttgccgtccagttccgcagcaagctgcatcacttccattttttcggtttcttcggtcgtataggcgaggtattcttccaaactaacttcggtggcatacactgccgagtgtgttccacctaagccaatccaaacctctttgtaaaggcggcttgcatcgttgttcatattgatagaaagtacctgacctttttccttgtcggtaagccccagcatcgcctgtatgtcatcgaatttgttcatatacttgcgttggtcaagcaggattttacagtcggagttattgatgatactttctttcacaatgggcgactggatgatgtcgtcaacctcttgtgtaactacaatcgcttccccgaaaaacttacgcacggtcttaaatagatacttaatgtattctgccattccctctttagcaatggctttccaagcctcttcaatcaggatgagcttgcgaataccttttagcctgcgcatcttgttaatgaagacttccataatgatgatggtcactattggaaagagaattttgtggtcttttatggcgtcgatttcaaacacgataaagcgtttggaaagcaggtctaactgcttgtcggagttaagcaggtaatcgtattcgccacccttatagtagggttcgagtacgtttaggaaattggcaatatcaaagtctttttcccttacctgtttttcttccagtaccttgcggtaatcgccttttacatactcatagaaaccgttaaatgaggggtaaacatcgtccgttttgatacgctcgatataaccgcttactgcattggataaagccacttcttccgaacgggtgggcggctcatcatcacgtttccaaagggtaagtatcaaagtcttgatactttcacgcttctcaatatcgaacacgccatcatcggtgtaaaaagggttaaaggcaataggattgtcttcggtgtaagtgaaataaacaccgtcttcgcctttcgtttttcctttgatgagttcgcataagccctgataggaattacccgtatctaccaacaatacgtgtgcgttttgctcgtaatactggcgtaccatatggttagtgaaaaacgacttacccgaaccggagggaccaagtataaacttgttccggttcgtgatgatgccccgcttcataggcaggtcggaaatatccaaatggataggttttcctgtaagcctgtcagccatcttgataccgaacggcgagggcgaattgtggtagttggtttcttccgtaaaaaaacacagggcaggctcgatgaaagtgtaaaaactttcttcactgggaaagtcgcctgcattgccgggcatacctgcccaatacaaagtggctacatccgtagtgttgtggcgtggcttacactccattaaagccaatgcactaccgcaatcattctttagctgtttcagttccgcagggtcttccgaccacgccataatgttgaagtgcgcacgaatggaagatagcccgaagctgtgggcttcgttcaggtatttctctatccattccttattaatttggttcgcacgactgtaccgagccaatgagtgcatattgcgggcagacttctcaaacttttgcaggttgtcttcgctgttatctaaaaacaggtattgattatagatatggttacagctaaggagcaatcccacaggtgcagcgaatgatagacggcaatcgctccggtcggtagatagcttttcaaaacgggtatctgccgataccgttccgggcaggtcgtctgtgtccgataaggtatgcaggcttaaccttttgttaccaatacgcacttcttccgttccgagtgcgatgtcctgcataggcgttccggcttccctcgatagcgtgaagtattgctccagtaatccctgcgtgtcctcggttccgataatttcatcttcggtcagacgtttcaggcttacaaaaccgctatcgttcacgatacgctcaaactgtgccaccgcttccataaaacgatgtatcgtttccttgttcctgatttctttcggtatcagcgaacctttgcaaagcgaactgaagttgctttgcatccgcatacgctctttggaggtcttcgttaagaacaggtaacagtaatgatttaaaaacggtcgctcgttaaaatggcgttgataggactttgccaaaaaactttggttgtcctctgataaatcgggcgcatagttctccttaatgtaccagtcctgtttgtgaatgaccgtaaaatcaggcaaggttttgatagccttatgccaggcggagtgtatcgcttcgtattcggctgaagctaccgtgaacagttccggcaaacgcacttcaaaacaggcggtaatgtccgcatctttggaaaggatgcagttgttttctactgccaacaaaggaaatttgctttccagtgtggtggtctttgcaacatttctcatagggtattcggtttagaagtgaattttaaatagcggtgtacaggcttgcggcagatgatgtagcggggatgccgtttattggctgcaattttcatcagcccgtgttcgccgtacttcctgttgagggaaaaggtctgccatacaatgagcgaagcaccgcccgcaccgaggaaaaggcagatgtaagagtttacgcctgccatatacagtatcatcacgaagatgagcgtaccgagcagcccacctgcgaagatgaacaggtattgcgcctttaagcctttgaactcaaccgttcttccgatgcctttgttgatattgtaattcataaggcaaaggattaaaggaagaatgaacgcaagatggtagccgctacaatcaggaagatacacgcaccgaaccacgaagccgcagtcttcgatgtatcagggtcgccggaactgaatttgttgtacaccttaacgccccctatcaaacctacgaccgcaccgatggcgtaaattaactgggttgcggggtcgaaataagaggttaccatttgggtagcctcgttgatacctgccgagccgtttccctgtgcaaacacgccgattgctgacagcatagccgctgctgtcagcaaaactttttttctttgtttttccataattgaaacacattaatttgttactgtttatcccgcaccttgcgagctttcgggacaaatgtcttatggaaaaagaggcgttataagaatgtggcagtcaaaggaagtgtttggctgtgagtggctttgcgatacgtgtatcagcataaaaaaacgccaaactttttacggtttgacgtttactaacccggcttttcatttacatctttcaccccttttttctctgtggtttttcagtaggtttttgcaggttcttttctgctttgaggttgctcttaatcaaaccaacaagaaaggttttttcccacggtacttgctttgcggtaaactgtaatttcaagccctgctttgccagtccgtgtgtcaattcaaatccgtactgcctgttccaaccaatcctgtcaagtaatctttcagacgggaaactcacagctattaaatctttgggcagctctttgatgttacggtagtcaggttcctgaaattcgtgtgtcttcggattgtaaggaatggtataggttcttttatcttcatcgtagtagttccctatatcggagaacacaatacctttagaaagaaaatcgtctttaggtcgaagcatatccatccgaatatctacatagaatgtatgccctgcaatatcaattgttggcaacattcctttatttacccgcatatcgtaggcttcctgattaaattccctttccatattaccctgtttaaaaagacaaagggaagtttatacaaactccccaatgtcaaaatcactcaaatcacttttccgcaaggtggaagaaccgtcgtcgctttcagttgaaagtgtgctatccaaaagctcggcaatttttcgggatgcaccttctatggaattttccagtaggctgaataattcagttccctgtaatttctgaactatggctaccgctgtttccttttgagcctgttccaaattttctttttggagcaatgcccctacggagcttagttcgtcgtaggtaaccccttgggcaagactgttatcgccaccggatattccgtacctgttccattcttcttcctcttcttccaaatcaggcatattgctgaaaacttcgtccagttcttcctgcggaatttgcataccgacgttttcgttctcgtcgtattcgatgtctaaattatcagggtttatctccggttccgttatttggctttcattggcagtgtttggcactgaatggctttttacgggcttgggctgacccataatatcgggcaggtttgggttcactttctcctgctgcatcggcttttgctgcgaccttttatgaatgacaatcttatcctgcacaagcaggacaatgactatcagcaggcaaatcacaattactatttccataatcaaatactttaaaaaatgggtttaaacttttcgttgaaatcgtctgtgattgctttctcaaacatttcaaaatgatgttccagtatattgtcgaggtaggcatacagtggtatctcatctttgccaataacctgaacaatccgggataagcgttcgtggtattcctgccggatgtaaatgcttttatccccccgtttggtcatcgagtgagattttaaaaaatgttcgccatagcttccgtcaagatttttcttggtacggttcctttccctttgtacaggtttgctttgtagcaattcttcctgtttcacttcttcttttacagtttccttttccggctcttcaggcagttcaggaggaagctgtaagccctcttttttaacgccgtccaccataaggttcatcatcaactcttcgtcgatgtcgggcgtgacttttcttttattatctttctccataaggctataattgaatgattttcaaaaactcattgatgaacaaatccaactggcaggctttcatcaaacgttcatcaggaggcagtacggtagaacggaaaaccgttttactgtccgcttcgctttctttgcgaaaacgggtgctgttcttgacttggttttgcatcaggctaaatcccagttgctcaataagctgattgtacacgtcatacaagggtgtgctttccctgccgtccacctggttccaaaacaggttaatggtttctatggacgtttcgccttttttcataatcacatcccgcaaaagctgtgtgaaaatgagggtgctttccatcactacacggtctgcgataataggcgtaaaaatgtggtgcattcctgccagtgctttcagaatgccgggcgtgttcacagttccgggcaggtcaaaaaataccacatcgaccggaacagcagaagccgctatatattcgtgtgccgcatccagtacgctatctgctctatactgtgttatgggataggcttttttgttgatggtggtaaattgcttgtacgccagttttttcaaagcctcattttccattaccattgccaaatcacgggctttcattttcattaagctatgctgcggaaaatccgcatcaaatacagctacgttgtagcctaaccgatagtgcatcgtacttgcaacaagcgtggtaaatgtgcttttgccaacaccgcctttttgagaagaaaaggcgataaacagaggtttcttttttgtgtccatattttaaaaatttaaagtgtacataatctttgtttgcaggcttgcaagcgttccggcaagccgttctgatttcacgctttcattcaggaaagctatcaggattgcctgcgggaaatactgattacctgcttcctttcagtacagcagccctgcattcattcaggtatcttgtcaggcaggcttgccgtcattctttcattccgtttatcaatccatccatcaggcgagccggatagttggatagcaggcgttcacgctttcttgctttcttgcattcctgccgtcttgcattcttgcaatcaggcaggcaggaaaacctgcgttcttgaatgtgtgcggtctgctcatcctgaagtacgggctgcctgtcttcctgccatcattcaaaggcaaagaaccaatcaatttcattcgattgtacagctatggcagtgtttggcgttcagaggcagcatttggcactgtggtactgaacaatgctttcggaaagaggggcttactttgtattgtgatttttattaacggatttatgcaaaagacttttgacatatcaaggggtaacgggaacggcaacaagccgtttttccctgttacattcaatccgtcccgcagggcggatttttgtgttcaccggaacacggcaagttgtgttttgagcatctcggaatgatttccgatgctcaaaacaacttgccctttgcagggggcagaaaacaccttccgaagtcagggttttgtatggatttaaaatggattagtgatgaacgataataacagtaagcaacaaaaaaagaccggacgccgcccgaaaaaagacccggcgaacatccgatacacgatttcctttaacgagcaggaacacgcccgttttcttgccctttttgacaaatcaggtatgcaggtaaaggcgcattttattacgtcctgcatctttgacaagactattaagaccattcagattgacaaaggaacggttgatttttatatgcggctgacctcttttcacagccagttccgttccataggcgtgaactataaccagattgtaaagctattgtacaagaatttttcggagaaaaaagccgcagcgttcctttataaactggaaaaacaaacggctgaaatggcgatgctttgtcaaaaaatcattcagataagcgaggaatttgaagccaaacacctgaataaacagccgtagaaatgatagcgaaaattggcagaagcggaaatttatacggcgcattggcatacaatcagcttaaagtggagaatgaaaacgggcaaattttgttcgccaataagatgattgaaaccgcaagcggtcattattccgttgcacaattagcccagtctttcgctccttatctgattgctaaccgcaataccgagaaacataccttgcatatttcgctcaatcccgacccgaaagacaaggtaagcgatgataaatttcgggaaatggcagaggaatatatgcgggaaatgggttacggcgaacagccttttgtagtattcaaacacaccgatattgaccgcagccatattcatattgtatcggtttgtgttgatgagcagggcaagaaaatttcggataagttcgagaaaatgcggtctatgaacctgtgccgggagttggaaagaaaacacgggttgatacccgcaacagacaaagaacgcaatcagaatgataaggttttccgtccggtagattatcgggcgggcgatgtaaaaagccaaatcgcttcggtagtccgacacttgccgaattattaccagtaccaaagtttgggcgaatacaatgctttgctatctcttttcaatattaccgccgagaaaatagagggagaattacagggaaagatgcagcagggtttattatacattcccttaaatgaaaaaggcgaaagagccgggcatccgttcaaggcttccctcttcgggaagagcgcagggctacctgctttggaattgcattttgcgaaatgcaaaacagctttaaaagaccacccaagcaagcaaaccctaaaagctgccgctgccattgccctgaaaacaacgggcgatgagcaggcttttaaaaagcaattggctgaacagggcattaacatagtggtgcgccggaatgatacaggtcgcatttacggaatgactttcatagaccataattccaaaacggtttggaacggttcacgtttgggcaaggaactttctgccaatgtctttaatgattactggaataataacatcaaaccggagatgaaagaacctgctttacagcaacccaaaatatccacatcaaatgatgcggatcttcctgcggaagaaccacaccatttgttcgacttcttatctacgaataagcacgaagacggtttgatagaagcattgggcggcttactgcccgaagcccagggcgaagattatgaagaattggattttgctaacaagatgaaaaagaaacgcaaacgccaaagaggtcagaaatagtaatcagccaaatactgccacacaacgccactggctgccacattcttagagccactccgcagagcctttaaattcacgcccgaacattaaaacttaaaataatgcagggagaagacgatttaagagggcttgccaagataatggcttttatgcgggcagtcagtattcttttggtgctgatgcacctttattggttctgctacgggttctttttagaacgtggttggacgttggaaataatcaacaagatattaggcaatttcgaccggacggcgggcttgttttcacataccctttataccaaggcgttcgctttggttttgcttgctttgagttgtttgggaacgaaaggcgtaaagaatgagaagataacctgggctaaaatctacgtggctttgggcgttggttttgtgctgttctttctgaacacgccgttgttaaagctatctccggtaataggcacatttctgtatatccttactatctcgttaggttatattgctttgctgatggcgggcgtatggatgagccgcttgcttcgtaccaacttaatggacgatgttttcaacaacgagaacgagagctttcaacaggaaacaaagctgatggaaaatgaatattccgttaacctgcccaccaaattttactacaaaggcaaatggaacaacggttggataaacattgtaaatcctttcagggcatcaatcgtgttgggtactccgggttccggtaaatcttatgccatcgtaaacaactacatcaagcagcagattgagaaaggctttagtatgtatatatatgattttaaatttgacgacctttccaccattgcctacaatcatttattgaagcatcgggataagtacaaagttcaaccaaaattctatgtgataaatttcgatgacccacgcaagagccataggtgcaatccactcaatcccgattttatgacagacatttccgacgcttacgaagcggcttacaccataatgctgaacctcaaccgtagctggatacagaagcaaggggattttttcgtggaaagcccaattatcctattggctgccattatttggtatctgaaaatctatgaggatggtaagtattgtacattcccgcacgccattgaattgctgaataaaaagtattcggacgtatttaccattctgacctcatattccgatttggaaaactatctttctccgtttatggatgcctggcaaggtggcgcacaagaccaattgcagggacagattgcatcggcaaaaatccctttgtcaagaatgattagcccgcagttgtattgggttatgactggcgatgactttacgctcgacatcaataacccaaaagagcctaaaattttgtgcgtgggtaataatcccgaccgccaaaatatctactccgcagcattgggtttgtacaattcccgtattgttaagctcatcaacaaaaaagggcaattaaagagttcagtaatcatagatgagctgcccacaatttattttaggggactggataatcttatcgcaacagcgagaagtaataaggtggctgtatgtttgggctttcaagacttttcgcaattaacgagggattacggcgacaaagaaagtaaggtaatacagaataccgtcggcaatatattcagtggtcaggtggttggagaaacggcaaaaagcctttcggaacgcttcggaaaagtattgcagaaacgccagagtatgaccattaaccgcaacgataaatctacctcaatttccacacaattagacagccttattccggcttccaaaatttcaactttgacacagggtatgttcgtaggttctgtatcggataactttgatgagcgcatcgagcaaaagattttccacgctgaaatcgtggtggataatgacaaggtagcagcagaaaccaaagcctataagcaaataccgcaaatcctttctttcgtaaacgagcagggcgaggataaaatgaaacagcagattgaaagcaactaccgtcagataaaacaagacattgtacagattatcgaaatggaattggagcgtatcaaaaatgacccggatttgcaacatttggtgcagcaagaataagagcgttttaggatatatccatcaaaaacagggctgtactttttacagccctgtttttttgtacagcactattactaaccttctcgttatcaagtttcaagaataatttcgaaaactaaatttaatcaaatgattaaaatatttggataaatcaagaataagtttttacatttgtcactgaaaagaattttaatgtaaaatggctaaaagtaaagaagtaaagaagttagacacttctactgaagaaaagataaagaacgctgctcgtatcgtattccataaaaaagggtttgcggcaacacgtacaagggacattgcagaggaagcagacattaaccttgctttgctcaattattatttccgcagtaaagaaaagttgtttgatattataatgcttgaaaccgtaacgggttttatgcacactatggcaacgatattgaatgacgagaaaacctctttagaaaagaaagtagaattggttgcttcccattatatagactttattacccaagagccgaatatccccatttttatgttgaacgaaatccgtaacaattcgggcggtctgttagaaaaattaccaatcaaacaaatagtaatgagttctgcatttgtcaaacaacatcaggaagctgttgcaaaaggaaaaattaccgaaccaaacccattgcattttttgatgaatttattgagcttggttgtttttccttttatcggacaaccattgttacagggaataagcgggttggatgaaacacagtttaacaagctgatgcaggagcgtaaaagattgatacctgtttggataaaagcgatgatgaaagcgaaataaatttttttgtccataagttaatcaaatgattgaaactaaaaattaaataaaatgattaaagtaattcataaacaaaaatcaaaatggctgataggcttattgctgatgtgcagccattgggcaatggcacaacaaaacaattcattgacccttgaccactgccttgaaatggcaaaacagaattatcctttgataaagcagtacacgctgatagaaaagacaaaggaatattctattgccaacgctcaaaaaggggttttacctcaattcaatatagcaggacaggcaacctatcaatcggctgttacccaagtcccgatttcattgcccaatgtggatattcctacaatgagcaaagaccaatacaggttatatggcgaggtatcgcagtccattaccgacctgtttaccgttaaagaccaaaaggaatatatcaatgccaattcggaaatagaaacacaaaaaacagaagtggaactatacaagctaagggaacgcatcaacaacctttatttcggaatattattgattgatgcccaaatccagcagaccgaactacttaaaaaggattttaaaagcggcatcgaaaaaaccaatgtagccattgccaacggcgtagcattgaaaagcacagccgacaacctgaaagccgagttgctgaaagcagaccagcgcaccattgaactgaaagccacacgcaaaggctatgccgatatgctggctttgttcatcggcaagtcgattgatgaaaataccgttcttgaaaaaccacataggcaaatgcttacacccacaatcaaccgccccgaactgaaactttacgacttacagaaaaaatcctttgacgtacaggaaaagctgattaccgctaaaaacctgcctcgtttgagtgcattttttcaaggcggttttggcagacctggtttgaatatgctggataatgattttcaaggttactatatcggtggtttacggttgagttggaacattacaggtttctatacttataagaacgaaaagaaaatgcttgctaacaatcaaagtttgatagacatacaacgagaaacttttttgttcaataccaacctcacattgaaacagcaaaacgctgatataaccaaaatgcaggatttgattgaaaccgataagagcattgttatacttcgtgaaagcgtaaagaacaccacacaaaatcaactcacttatggtacggcaaccacaaacgattacctcattgcggtaaatgccgaagaccaggcgaagcaaagtttgattttacacgaaatacagcttttaatgacagagtacaacgctcaaacaacagcaggaaattagtaacaataaaaaaagtagaacaatgtataaaataaaaacaatcgcattgatagcaagcatcgcaacagtgcttactgcttgcaacaataacaaagtttcatttgatgcttcgggaagttttgaggcagaagaaaccattatttcatcggaagccacaggcacaatcaagcagttcagcatcgaagaggggcaaacattggaagcaggacaaaccattggctacatagacagcttgcagttgtatctgaagaaaaagcagttggaagcacaggttacagccattttggggaaaaagcccaatatacctgttcagctatctgccttgcaggaacagcttagaacggctgaaagagaaaggacaagagttgctaatttggtaaaaggcgatgcagccacacccaaacagttagatgacatcaacgcacagattgaagtattgaaaaaacaaatcgaagcacaaaaatcaacgttgagcatttcaagcgagggcttaggcaaagacgttgtgccattgcaggtgcagattgagcaactgaacgaccagcttgcaaaatgctatatcataaatcccgcaagtggaacggtactttccaaatatgccgaagccaacgaaatgacgtcagcgggaaaaccgctttacaaaatcgccaatttatccaacattattttgagggtttacatcacaggcgaccaactaccacaggcaaaattgaaccaaacagtaaaagtgcttaccgatgacggcaaaggcggttacaaagaaaccgcaggtacaatcatttggataaacgacaaagcggagtttacacccaaaaccattcagaccaaagacgaaagggcaaatatggtatatgccgtgaagataaaagttaaaaatgacggtttatacaaagtaggtatgtatggcgaaataaaattccaatagcaatggcagacgttgtattaaataacattgtaaagacctacaataaaggcgaagtaaaggcagtaaacgatgtttcttttgaggtaaacaagggcgaattgtttggcttgattggagcagacggagcaggaaaaacaagcattttccgcatacttactacgctattgcttcccgatagcggtacggcttccgtaaatggttttgacgtagtaaaagactataaagccattcgcaaaaatgtaggttatatgcccggcaaattttcattgtatcaagatttatcagtagaggaaaacctcaacttttttgcaaccgtattcaataccaccgttgcggaaaattacgatttggtaaaggatatttatgtacagttagagccgtttaaaaatcgaagagcaggaaaattgtctggtggtatgaagcagaaactggctttgtgttgtgctttaattcatcgcccaacagtattgtttttagacgagccgaccacaggcgtagatgtagtttcaagaaaagaattttgggaaatgctgaaaggcttaaaacagcagggcattaccattttggtttcaaccccttatatggacgaagccacgctttgcgaacgcatcgcattgatacaaaacggcagcataatgtctattgatacgcccgatactatcatcaaacagtttcccgacaagttgtttgcagtaaaggcaaacgatatgggtaaactcttgaatgctttgcgaaacaacacacagataaaaagttgtttttcatttggcgactttcatcacatcacgtttcaaaatgataatgagcgttcacaaaatgaactgatacaaaccttgcaggaagccgattttcaagacattgaactcaaacacatcacaccaagcattgaagattgctttataaatctgatgaactgatatgacaaacgaagtagtaataaaaacagagaaattaaccaagcgttttggcgatttcatcgctacaaacgaagttacgtttgaagtgtacgaaggggaaattttcggtttcttaggtgcaaacggtgcaggaaaaacaaccgcaatgaaaatgctttgcgggctttccaaaccctcatcgggcaatgctaccattgcaggttttgacatttacaagcagaccgaagaaattaaaaagaacatcggttatatgagccaaaaattttcattgtacgaagatttaacggtaatagaaaatattcaattctttggcggtatttatggtttatccgataagcaactaaacgcaaaaagcaatgaactgattgaaacattgggattgcagagcgaagcaaaaaaattagtggcttctttgcctttgggttggaaacagaaattagcgttttcagttgccgtaatacacgaacctaaaattgtgtttttagatgaacccacaggaggcgttgaccctgtaacaagacggcagttttgggatttgatttattcggcagccgatagaggtattaccattttcgtaactacccactatatggacgaagccgaatactgcaaccgtatttctatgatggtggacggagtaataaaagcattggacacacctgccaatttaaaacaacaatattcagccgcttcaatggacgatgtattttataagttggcaagaggagcaaaacgaaaatcagattaaagatgaaacagtttttatcatttgtaagaaaagaattttatcacgtattccgtgatagcaaaacgctgttaatgctattcggcttgcctatagtgcagattgtgctgtttggttttgcactcacaaacgaaatcaaaaattccaaaatagttatttgcgattatgcaaaagatgaagccacacaacaaatcatcaacaagatagaagcaagcaggaattttgaaattcagaaagcattaatgagccacaaacagattgaagaagcctttaaggaaggaaacacaaaattggcaattatttttcctaccaatttcaataaagacttattgcacttaaatcaggcacaagttcagattattgccgatgcttccgaccccaacactgccaacacattaactaattacgcaaccaatatcattatggattatcagcaggagttgatgaaaaacaatgcaatgccattccgtatagttcccgaactgcggatgttgtacaatcccgaattgaaaggagcaaccaactttgtgccaggcgtaatggcattggtgctaatgctgatttgtgtgatgatgacttccgtttccatagttcgggaaaaagaaacaggcacaatggaagtgctgttagtttcacctttcaatccctttttggttatcatttcaaaagccattccgtatttgtttttgtcgttaatcaatcttacgataattcttgtattaagcattacgcttttggatatgcctataaatggcagcgttttactactattcgcaacaagcaccttgttgattatttgtgctttgtctttgggcttattgatttcaaacgtaacacagtcgcagcaagcagcaatgcttatttcaatgatgggtatgttagtacctacaatgttatttacaggctttatgttccctatcgaaaatatgcctgttccgttgcaggtcatttgtaacctcattccttcaaaatggtattacaccattgtaaaatcaataatgataaaagggcttggatttagtgctatatggaaagaaatattggtgcttttcggaatgacttgttttttattggtagtgagcttcaaaaaatttaaaacccgattggtatgagaacgctaaaatttttattgcaaaaagagttcaaacaaatctttcgtaataaagcgttgttaccgttgatttttgttgtgccgatagttcagttgctcatacttccgttggcagccgattacgaagtaaagaacatcaacatttcaatcgttgaccacgaccattctacttattcgcaacaactgatttcaaaaattaccgcttcgggatatttccaattggcagattacggaaactcatttcaaagtgcatttaatcagattgaaaaagataaatccgatttgattttggaaataccgcagggatttgaaaagaacttagttcgtgaaaatgagcaaaaattatttattgctgttaatgcaatcaatggtgtaaaagcaggtttgggcggtgcttatctcgcacagattatttcggcatacaataatgatattcgcttgcaatgggtacaacccgataagtataatactgcacctgttattaccgttgcttcatcaaattggttcaatccatttatgaactatcgtttttttatggttccgggcattttggttgtgttggtaacaatggtaggggcttatatgtgtgcattgaacattgtaaaagaaaaagaagtcggcactattgaacaaatcaacgttacaccgattaagaaatatcagtttgtattaggcaagctcattccgttttgggcaatcggaatgttaatttttagtatcggcttgttcattgtagcacgttttgtttacggcattgttcctgtcggaagtttgcttttgttgtatggttatttgtcaatttatctgattgctttattgggtttgggattactcatttccacatttgccgaaacacaacagcaggcaatgtcggtagcctttttcttcattatgatttttatgctgatgagtggcttgttcactccgcttgacggaatgcctcaatgggcttacatcatagcaaagagtattcctgtaacttattttattgaggtagtacgaatgataattttgaaaggaagcggtttttccgacatcaaatatcattttattattatgattggatttgctgttttattgaacggcttggcgatttggaattataaaaagacgagttagatgtaatgctgattttcctattcaacaaataggaaaatgcctaaatattatgatttaggcatttttttaataaccggaacatcatccaatgtaaattaaatggacaaattctataatgaaatattacataaattagaaactgcaattcaggaactggagattgaaaccgactgcccgataaaaagaatagaagcggttatagagcttatcattcaaagccttgccgatttaaaggaatttgtattgaagcacgactttaaaaatatggaagaggaaatccattttttcaagtatcagaaacctgttattgtttcaaagctcatttactacaattccatctataaaatagaaacgagaagaccgtatggaaacaagcgcaccaagaaatattttaccaaagaactaaaaaagctaaaaaggttctttgagaataaccttgatttttacaagtattaccgcagtaacaattctttcgttgacgagaagttttttgtacgtgggaagcacgatataaggttatggttggacactttttatttcgaggcagaccaccgcttttctacttcgcacgattataaggttgccaagataattgccaatgacctgatacaagtttatttggaagacaggctgaataacatcaatgtgaaaaagggttcggacaattcattgaaatggacggcaagtaaaacggcactgactgaactcatatatgcactgtactcccacggtgtatttaacaatgggaatacagatataaaattgattgctaaagcatttgaagatgcctttaatattgaattgggcgatttttaccatacgtttatggaactgaaagcccgtaagataaaccgaaccaaattccttgacagcctgtgtgaagccctaataaaaaaaatggacgaaaaggacgaaaagtaacgactattataatacgccacgaggtgaatgaacgccttttgttcgtataatgctttcctgcacctttggggcttcattctgcttttctgcctgctccgaagcatcttgtttggtttccggcgtaatagatagctgtatctttctttctacggcagccagttccgttttaagctcactcaatcgactttccttagcccaagtaccgttaaccacttcctgaagtatcggcaggtctttttgtatttcagcgattttctcctgctcctgcttcacaaagcccggcagtttttccaaagcccttaaaaaattcattgcggcggtttcggggtcttttgccatcagaccgttattgtaggtgtacttgatattgccctcgccagttataaaaaatctattgaccctttcgagtgttgaattatcctttggaagttctgttttaaccaataattgaaacccgtagaggttgcctatttcacgatagtcgcctgccgtgcgggctttgttcgcaatctcgttcagttttgcgcctatttgtttcggatttgcattgggcggcaagccatctaacagcacagggttttcgattgtaccgtccgaacgcttttgcaggcgttgctgtaagttttcccagtcggtactcatccggctcaaacgggattgagtgctttgcaacatttccatataatcctgtaccttaaatttggcactggatttagagcggttgaacgcctgcttttcgctttccagtccggcaatctgtttttccagtttggctttatccaacaggtctgtatttcctgacaggattgccacatattccgaaaagttcattcccgatttttcgtccatacttccctcgtcaatcgttcttttggtcaggttgttggtctttaactggtcgatgaaaagctgcttattgtacagcaggttaaacttgtagctatccagtgatttttctacggcgtagataatcacagctactttgttatcggcaaagaatttggcaacctcattgcctttgcggattgcccgcccgtccctttgggcgaggtctgacggtcgccacggcgtatctaaatgatgcacggctacggctcttttctgtgcattcacacccgtgcctaacatactggtagaaccgaacagcacccggattttaccctcgttcattccattgataaggtctttacgctgcttatcatttttagcttcctgaataaaccgcacttcgtttgcaggtatgccgtggtcttctacgagcttgcgtttgatttcggagtacacattccattcgccgggcttgtaggttcccaaatcggaaaacacgaactgcgttcctttctgtgcgttgaactctttgtaatacttggcaatgtttgccgcacaatgcgaagccttgttatcgggatggtcttcatatatcccgcttaccaaacgcatatcaagcgacatcttacgggcatagtccgtagcaatgagcatctttgctttttcttccctttgcgatagtggtaatcttccgagcaaagtagcatcgcccgttttagcaaactgcatcaggctttggataaaatcttcttggtcgggcgttggcggtatattgtacaatacctcattcttttcggggcggtcaataccaatatcctttgccgtcctgtaatctgttatttcagaatagaactgcgccagttccggcactttgatgaagtagcggaaacgctctttagcgactatattattggctaccgaaaattcataatcggtcgttttccttgcatagatagctgcccacgcatcaaaagaatgaatgccttgtttttccaatgcacgagggcgcaggtacttgaatagtaggtacaattccgttaatgagttgctgatagttgtacccgaaagaaaagttgctcccatatccgcattggttcgctcctgaatggtgcggatagcaaagagcaggttaagtgccttttggctcccgtccacattacccagtccggctacccgtgtgtgacgggtgttaaacatcaggtttttgaactggtggctttcatccacaaacaaatggtctatacccatcattttgaagtccacaatatcatctttgcggttttcaatatcgtgttggagtgttttcagttttacttcaagattttctttccttttgattacacccgaaagcatcccccttgttacttccttaccttgcgattgcagggcatcgaggttgcgctctacgctgtctaattctatttcgaggatttccttttgtatttcgggcgattgcggtatcattccgaactggtcgtgcgtgagtatcacacaatcccaatcgttgtttttaatatccccgaaaatccgcaggcgtttttgaggtgtaaaatcatcaatacctggataaaggattttagcgtgtggataggctttgcggtagtcttcagcaatggcaggtatattcgctttcagcccaattatcattggtttatgggctaagcccaaccgcttcatttcctgtgctgctgtacacattatcagcgtttttcctgcacctacttcgtggtcgcagatagcaccgttgttcagttttatcatccaaacggtgtccttttggcttgaataaaggtcttcaatacctgctgcctttcggtctaatcccggaaagtcctgatgactgccgtcatagttcgggcgaacaaaacagttaaaggtatcattgtattggtctgtcagcctgtttttaaactcatcattctgtgcgtgaagccaatcggtaaaggcagtacggatttcatcaatcttggtgttcgccatttgtatggcttccatatcccgtactttgacctcttggtcgccaaccattacttttttggtaatatccggcgtggtattgacaagggcgtgtttgagcagggcaataccgtcaaatgttcggctttctgccttgactgcatatttttcccaaatgtgcatattgccgtgatgacactttacggaaaagtcgtcggagctttcggaataatgaaccagtacatcggcatcaaacaaatgcgaagcaaaccgggcataaattcccgtaggtatccaccgttcgccgaggttaaaatccaactcttcaaattcaatccgtcttggtcgggcttcttctaaagcagtaaggctttctttggcttccttgtcatcgggattgttttcgagataggtttttacttcgttggctttctcaacaacgttgcctgcaatccaccgttcagcaatttcatattcctgttgtagcggattgtagaacaaccgcccgtgcaaggcttcttttagcgtatcgacaggcaggctgctgatttcggacataaaatccaaatccacgcttccgtatttgttcagcgatgccgctaaagcctcttcgggattgtcggttgctaatgtggtaatagaaaagctgacagggcggctgaatatatccgctttatgaattacgcccccgataatacgttccagatacggtatttccttgcctgcgctgtctgtctttatgagcttggcattgtcggcagcattcagattgccgtattttttagtaaaggcatcataaaggaggttcagcgtttcccgttcttccttgtgttcagtttgcttttcagcttcattttgatagaggttaatataactatcccttacggcaatataggcttcggctcttgctttttgtaaagtcggtaattgcaatggatgaaaggttgctgatgatttttcttcgtttctttcgacatcttgcagataaccaacccaaccattatctacaacaaggcaatcattacggtggaaagattgcagttcgccattatacggagcaggtttgggaatggcattattaacggcactgggaacggctgacttatcagtctggccattcccgtttatttgagaaaacaggtcgccaattgcttcctgatttttgccgtttatctttggagtaccgttagcagtaccgttggtttttggtggtatataggtttgctgcaatacaccactgaacaggtcggtttggcgacctattgtatctctgctttttcgggtgctttgccttgtgcttcgggttgttcttttgggtaacgcaattacggcaacaggttcgcccgcactttcaaacaggtcgaaaatgcttagttgcttcaattcctgcgggatttcctgacggataaccggagttggttcgggttgtagcttttgccgaatggttacagggtctattaccggaggtataacctttggttcaaccgggatttgtataataggctcatcgttccgttcgcctttgtataaacccaaattcagatgcttaccgaaatcttcggaaagcatttgttttaaatctttggcaatcccatcaacaccgtttttatgcgtatagattaaggcaggctgtccgtatgggtctgtacctaatttgtagtctgtatgcacaatccttgcactgttttgaaacaaggcattgcctggtgtattgtattcggttggattgcttcggcaaaacagatcttccctttcggtcagattttcttttgccgtatttttttgcaggataatcaggtcgctgccgacttccgtacctgcatattctgtaaacaggttgttaggcaatcttacaaccgataccaaattattatcctgcattaacgccctgcgtatgggttcgtttttaggactgttcaatatgccttgtgaagtaatataaactaacaaaccaccctcacggagcatatcagcacctttcagaaagaagtaattatgtatgcttcgggcagcctgtatttttgcatcgtccctgcttcgggtataagaaaggtcgaatacggaagtatcgccaaaaggaatgttactggctactacatcatagctgttttgttccctttcgggaatttcctcaaaaccgcttacacgtacattgctttcgggatagagctgctttaaaatcttgcctgtcagcaagtctttttcataggcagtaacatttgctttttgactttccgaaaaggactgtacaaatgagccgatacctgcggagggttcgaggaatttattaatatgcagaccgctatcacgcaaggctgatgaaatggcatctatgacctttggcggggtataaaaagccgttaaaacagaacttttcatactatccacgtacctgcggtactgcttttcgtcttcggaattttctttgagtagttggtggagttcctgcgtaatcggaaagaggtcgtgttccgtttttctccaattattgatgtctatttcgttttcaatagggttcagaacgaatttaagaccgccaaatccgctgtattgcatcattagcagtctttcgcctacggtggcttgccgtttctccttttccagtttaaaaacaattcgcagggcatcaatattcttttggagatggaaccgcttactgaagcccattttcctcaatccatattgcgatggttccggtcagttcggtatagagtaaatcgaactcaaacccgtaggcgaaatcatcagttaattcatagcctgcaaatacaggttcgcaaataggaaacattttcagggcgaacggtcgcagttcctcatctgccattatggtatcaaactcattgcataccactttaaaaaccgtgtcgaacttggagaagtgtaagccctcaaacaatatgtaattggctatttcattgcattgctctacggcgtttcccgaccggaacgccccctcataagcgttggcagcccacgaagaccgttggtctataaatttttggtcgtgtgccttttcggggaagctgctgtttaataattcttgcagtcgtaatctgaaatacgataggtctttttgctgtacgtccatactatattttgtttagaattttacttaaatcctaaaattataagcggaagcaaatgcctttgtgaatgttgcagggtttggcgttgagaggcggtatttggcgtaatggacaataaaaaacctctgaaaaattcagaggttcatttttatggcttgttaaggatttggagcatcctgccgacttcaatatccattcgagaaaaggcaaaccattttttgcccaggtctttgagtgatgccccgatatggtaaagctctgtattgtcaataatcaaaaaacggtcgtgggcatcggagaaaatctcaatatctattgcaggatattggctgttgtagcgttgtaaatctaaccgtaactggttactgatgcttttggtaaggatagtggcagttacattatcattgcgcttacccaataaagtaagcaccgtatcatccacataattgtcaagcaggataatggaacttccggctttacggataatatcggaaacaaaagtataggcatcaaaaacctgtccgttgtaaaagatacctttttcgctgtgcagcttgtcgctttccaaagccttaaaaatctcttcaaatttttggtcggcttccagttgcctcaattcaatattatctaaccgatgaaacaaagaagcattgctaatgagcatacgccgcatttctacaaaggcttccattatttgaacgctcatttttaccgctatatcggaacggagtatggcagatgccattgcaaccccctgttcggtaaaaacatagggtaaataacgtctgccgccgtaatttaaacttgaggttccaatttggaacctcaagttttcaacttccttttcagtcagttgaaagcagaatgatacaggaaatcgctcaatatttcttttaacggctttgttcaggttctttgtttctacctgatataaggcagcgaggtcactatccaacattacctgtttgccccggatagtataaatcaggttcctgatttctttgggtacgattgacggtttattttccattgcgtttactgcttttgtttttctcaaactcaaaagaggtactacaatcggcattcaacacgatatacgcatcgaatttcttacctgctttgcttgtcattcctttgattaaagaggttttgcctttattgacaaggcttgttacattttcgatactgatttgcacaccgcagacgatacggaactgtacccaactacaaacctcatcgggacacttcacaattttatcacggataatgagttgctggcttttgcatttagggcaaaccaacttcggtaggttgttttgagcaatagaagtttgcagcaattcatcggtaatggatttggcataggtttccatttccttttgaaatgttccggcatccgcttcgttgttctcgattttctgcaatgccaattcccattcggcggtcattgccacatccgcaatttttcggtctttgacaagcccgtacacctgcaatcctttttcagtaggtattaaggaacgcttatccctttggatataattgcgggtaaacaaggtttcgataatggcggctcttgttgcaggagtaccgataccgatatttttgagggctttgcgctcttcctcgttctcgatttctttccctgcggtttccatagccgacaaaagcccggcttcggtgtaaagcactggcggtttggtctgcttttccaaaacggcggcttcctttattttgagttcatcgcctttattcagttcaggtagttcctgtaccggctcttcgccatcatcggtaaaacttcctttgatggaacgccaacccgcttcctgaattttacagccttttgccgtaaagtcgtaatgcaacacctgcaatgatacatcggttatttctttgacacaggcttgtgatatggcttcgagcaggcgaagtgcaatcatattgtaaatcttatcttcatctgcgttcaacacagacggcactttgtcggtaatcaataaaccgtgatggtccgttacacggaggtcattcacgatacgtttattgaaccgtccccatttgattttgctaagggcttgtttgcaatcttcacggttctgcaatgcccgcacaaggtttggaatttcagcccacatatcttcaggaatgtatttgcttccggtacgtgggtacgtgataaatttcttttcgtacaggctttgtgcgatattaagcgttgcttcagcagataatttcagtcttttgttagcttccttttgtaagcctgtcaaatcaaaaagcaagggcggttgttctgtaacgcttttggtttctaccgaggtaacagttgccgttgtgccacgctgaatagctctaagggtatcatcggcaagttgcttttcttcccatttggtagcggaaatacttttgaaatcaacctgcgttttgttgtgcatcaactgtatctgccagtatttctttaccgtgaaattcttattgtcaaggtagcgtttgcatatcaaagccagtgtgggtgtttgcactcttccgagcgaatagataccgttacctgcggctatactcaatgcctgtgtagcattgatgcctacaagccagtcggcacggcttctgccttgcgcagcctggtacaatccgtcaaatgctgccccgtctttcaggttgtcaaaaccctgctttattgccttttcggtaagtgaacttatccaaaggcgttcaaaaggcttgttgcatttcaggtactcataaatgtacctgaaaatgagttcgccctcacgacctgcatcggtagcaacgatgatgctgttgctttgcttaaaaagttgctcaatgactttcagttgctttaatgcgccagcatcggcagtatagcctttatcttttttgactttgcgaacggtcaataaaaacgggttaggcaatataggcaaagcggctttgtcaaatcccgtaatcccataatcttcgggcattcccagtcctattaaatgaccgaatgcccacgtaacaaaatagccgttacctgtcaggtagccgtcctttttttcagatgctcccaacaagccggctatctcccttgctacgcttggtttttctgctataattgttttcatactgtattacatttttctgcctttggattttgcaggagtttcgggtttttcttgttgttcctgctgcttttcatttttcggtctttgttgcccggacttcaaaggctctttgatgttcttggttgcttcattggtcttaccctctgaattaacggcagtctgtgttttatgggtttcggcagtttctacccgtgctttatactgaccgggaaattcaaagttggtctttccggtatctttgtcgaaagtgatataacccttgtagggttggtcttttttatctttcaattccacatatatggtttgcccggctttgaatttgttgtactgctcatcgtccagttctttgcccctgaaagttttcggagcttcctgcggttggctttgctgattattctgctgattgccctgttgattggtttgttggttggtttgcgcctgctgatggttattgcttctgtcaaacaggaactctacatatcgtttgtccgcattaaactgtaccattgcagaaaactctgttcctttggtagaaatcataccttgcagataaagcggtttgccttccattaaggtttgcttttgctcgtcattcagtttcacaccttttaactcatcaggtatttttatgaaatcagttcgcaatgccactacatcattggtaagcctgtcaatgctgataatagacggcatcagttcgcccgttttagaatttaccaaattgactacacgccccatattgcccgtttcaagcaggtttttcttgtcttcgtccgtaaacttgtgaccgaaaaactcaaaatggaggttaggctcttttttgataccgtgtattgccacgataacattaccgtcttccgcttgctgtaaagacaagcgggcatccgtgcgcagaatagaaccgccgaggttaatgcctatcggtaagagttcattggttttgtaacctcttaatagagggtcaagcaggtttcttttttcaagatactctttgcttaatccgaggtttttcattgtgtcccaatcaatctgctccggcttgtagcgatattcactcgtttccgttgttgtttgtgctgttgccatattattttgattttcttgttttttgtcctgttgcggttctgcctttacttcgagttctttcagcactttctcgccatcgggagtgggcttatctacgtgcttttgtaattcctgtgctttttcagcagcaataggggcgggtactttgaagaaagtaaagtttgtagggttctttaactggctgaaaaaattagaaaagaagttggaaaagaaatcgccgcttttgtccacacgcataaactggctttggttttccttagtagggtcaacggtttccattttccctttttcgtcgatactcttcactgcctggattttcattttttctttatccagtacgagtaatatgtccgatagctgttcgggcatatcctgtttattagttgtttcttcgctcataatctgaaaattttaaaaattcactgtcgaatgtaaaggaagcctgcaccgcattgcactatgtggcagtcaaaggcagtgtttgtcacttattggcatccagtttgggcaaaggcgggttaaaactttccctgatgaactggtgcacatcggatagtttgtaatacaatttgccactaatggtatagtaagggagcttgccgatggagcgataccgttgcagggaacggttactgattttcagcatttgcaataaatcctgattatccagtaattcttcgccgtctatactgttgcgtttcttttgtaagtcgtctatgtggttgccgagaatgtcgagcctgtccattatgcgttccatccacgccacaaattccattttgtcgatgttcataccttatacttttacttattacctgatttcagctttctgcctttttcgatgtagcttttgccttgcgccataagctgctccacgtattcatcggtggtctgcacggcattggcgttcagcatttccttgattgcgccaatcgtatagtaatactgcccgtacatttttgaaaaggctatctgcccgttggtgcgcatacgccacaatgttttttcgctgatgtggaggtactggcagacttcgtgattgttgagccacaaactatcgtagcttgtatcttccagtttgaggatatattcgctgatggctttcaaccgttcgttgaggtgcttccacacttcttcgtcaactgttataatattcattgcgctgtcgtttaatgttcacagggcaaaattcagaagtgtggcagtgtttgtctgccaatgcttgccaattgaaaaagcagttttttgaaaattttacaatttgacggaaagcctcattaaataagggttttggcgaattttccgatttgaggtatagtaaaacaagcccttatgccaattggcatatatgggcaagcgcaaacacaaaaaaagcaatacgggatgcatatcgctttcaaactctttattgatggagtgtttataagtccttatccatatattcttccagtgcctgtttcaaatggtctaaaaacaaggtgcgggagcctgcacgggttttcatccggtggaatgcgtgatgcacatcggtcaatgatattcggaacaagacttgtgaaatagcagtgagcttccggatgcccaacttaccgtccgaaatagcacctgatgcgtacagggcatacatcagctcaatcagagcgtttttgctgtccgtccaggaaagttctttgatgtcgtctgtgttctgaaaaaaggtgtcgggattttcttcggggctgattttggttaagaggtaggcgtataacaggtcgttggcgaggatgcgggctactttgtaatcgtaataggtagagaattgcgggtcgatttcaaaaacgtagctgttaagcccatcaaggtaatttatctgcccacgcttaaaatattcgtggtctttatccaccctgcccgaacggtagtagcgataaaaatgggagttgcagatgtgttccctgaactcaatctttagctccgttaaatggttcgagaaatagttatgatacattttcccattattgaccggacacgaggtttctatccggtagagcttgttataatagatgagtttgcccaggatttggggcttaatcattttaaagaactcaatctcttttgcatcgttctcaaatcccgaacttagcacacattcttttgccgaaaccaatagctcctgaagaaagaccgtcatttgaaaagcctcttcaattagccccgagcacgtaattgaaaattttcgttcctgctcctgaatttcggtaacaatagttcctaatgactttctcatagtagggaggattacgttatcaatatcagagtaccttagcaaatgttattaataaacagcactttaaccgccaatattcccctacaatggggaagattttagctgttttcccctatgaaaaccgttgtttgcatcacttagtcgctcataatcaataaatacttaatttttaatcttaaatttgtacttgcgtattgatgcaacaaaatgaattgtgatttagcgaaatatgagtacattatttatcaaaaatatggtctgcaaccgttgcatcctcgtagttcagaacgaactcgacaagctcggcatagaggctaccaatataaaactgggcgaaataacccttaaaaaagatttaaccaccaaagaacgtgaagaattggaaaacgttttagaccctttgggttttcaggtcatcgacgacaagaagagccggatgattgagaaaataaagaacgttatcattgacctggtgcaccatcaggacaacgatgcgaaaaccaatctttcggacgtgttgagcgatgcgctacaccacgattacaactaccttagcaacctgttttccgatattgagggtacgactattgagaagtattttatcgcacagaaagtagaaaagataaaagaactgttggtgtacgatgaactgtcgttaagcgagattgccgaccgtatgaattattcgagcgtggcatatttgagcaaccagttcaagaaagtaacagggcttacaccgagccatttcaagcagatacgggaagacaagcgcaagccactggataaggtttaagtaaatcttacaaatcaaacccagaatttcacaatagaactcctctttattgttgccacctttgcattatgaaaataaagcaatcgagatatggcaacaaatagagaaacaatttacattcctttagaggatgtagaaagcgaacactgtgcattaatcgtcgaaaaaggactggcacaggtaaaaggcgtagaaacccacaaagtagagctaaataaccgcagggcggctattaccgttaatgataacgaggtagtaggcgaagctgtaaaggcaatcaaagatttgggctacggcgttcccaccgttaaaaagacctatcctgtattgggtatgacttgtgcctcttgtgcaggcagtgccgagagtatggcaaaatacactccgggcgtagtaaatgcggaagtgaattacggtacaggaaacctcaacgttgagttcctgcctaatataaccagttccgagcaaatcaggaaagcggtacaggacggcggttatgacctcttgctcgaagatgagaacaagcagcaggaaaccttagaagctatccacgccgaaaaattcagaaaacttaaaaacaaaaccatttgggcggtaatcctatcgctcccggtagtcattatcggtatgttctttatgaatatgccttatggtaacgaaataatgtgggcgttttccactccggtagtgctttggttaggtaaggactttttcatcaatgcgtggaagcaggcaaaacaccgttctgccaatatggacacgttggttgcattaagtacaggtatcgcctatatattcagcgtattcaatatgctgtttatggacttttggcatcagagaggcttacacgctcacgtgtattttgaagccgcagccgtaatcgttgcttttatcctattgggtaaactattggaagaaaaagccaaaggcaatacctcgtcagccattaaaaagttgatgggcttacagccgaaaacagttatcgtaatagaagcggacggaacggaaagacaaaaagccatcgaagatgtaaacgcaggcgatattattttggttaagccgggcgaaaaaatcgcagtggatggtatggtcgtatcgggcaattcgtatgttgatgaaagtatgctaagcggcgagcctgttccggtactgaaaaaggaaaacgaaaaggtatttgccggaaccatcaaccaaaaaggtagtttccagttcaaggcggtaaaagtgggtaaagaaacaatgcttgcccaaatcatcaaaatggtgcaggatgcacagggaagtaaagcacccgtacaaaaactggtggataaaatcgcagggattttcgttcccgtggttatcagcattgccattcttacatttatcctttggtacttcttaggcggcgacaatggcgttgtacaaggtcttttagcagccgtaacggtactggttatcgcttgtccttgtgctttaggtttggctacacctaccgctattatggtgggcgttggtaaaggtgctgaaaacggtatcctgattaaagatgcggaaagtctggaactggcgaagaaagtaaacgctatcgtactggataaaaccggaaccattaccgagggaagaccacaggttacaggcatccaatggctaaacaatgaggatgcgaccaaagatgttttattgagcatcgaaaagcaatcggagcacccattagcggaagccgttgtgaaaaatttggagggcgtttccaccactgtattatcaaacttcgacagtatcacaggtaaaggcgcaaaagccgattacaacaacgatacttactatgtaggtaataaaaaactgttagccgaaaacaacattaccattgccgaccaactgcaacagcaggcggacgaatggggcacacagtctaaaaccgttatatggtttgcaaacagcaaacaggctctttctgtaatcgctatttccgacaaaataaaagaaacatcggtagcggctatcaaggaaatgcaggatatgggcatcgacctgtatatgctgaccggagataacgaagctacggcaaaagcgattgcatcgcaaacaggcatcaagcactacaaagcggaagtattgccacagcacaaagcagactttgtaaaagaactgcaagcacagggcaaagtggtagcaatggtgggcgacggtatcaacgatagtaccgcactggcgaccgccgatgtaagtatcgcaatgggtaaaggttcggatatcgcaatggacgtggctaaaatgaccatcatttcatcagaccttaccaaaattccgcaggcgattagattgtcaaaacagaccgttgcgaccattaagcaaaatctgttttgggcgttcatctacaaccttatcggtattccgattgccgcaggtattctttacccgattaacggtttcttactgaacccgatgattgcaggtgcagcgatggctctaagtagcgtgagcgtggtaagtaacagtttacgcttgaagtggaagaagtaaatcttacaaataaaacacggaataacgaactaaaataaaatgttttgctgctgaaatttgcagcagaaaaacaataattataaaagaaatatgggacacgaccacgaccacgggcacagccattcgcacagtgcgaataaaaagaccctaactattagcttaattatcattacggtgtatatggcagtagaagtaatcggcggattactgactaacagccttgcactattagccgatgcggggcatatgttgagcgatgcggtatcattgttcattgcattgatggcatttaagttcagcagcaaggtagccgactacggcaagacctacggctacaaaagatttgaaatattagcggctgttatcaacggcgcaacgttgatactgatttcaggttatattatttacgaagcgatagaacgcttccagaacccgccggaaattcaatcaagcggtatgctcatcgtggcattcatcggcttactcgttaatgtgcttgtagcctggataatgatgcgtggggctgacgtaaaagaaaacctgaatatgcggggagcctacctgcacgttatcagcgatatgctcggttcggtaggtgctatcatcgcagctttactgattatgttcttcggttggggatgggcagacccgttggcaagcgttattgtttcgatactggtattgcgaagcggttacttagttaccaaatcatcggtacacgtactgatggagggcacaccggagaatgtggaagtagaaaaggtaacagaaaaaatcctgaagaccgagggtatcaacggtatgcacgacctgcacatctggacgattacaagcggactgaatgcgcttacctgccatttggtggtggatgaaaaaatgacgattggcgaaagcgaaacattgctccgcaaaatcgagcatacattggaacacctgaacattcatcacgtgactatccagttggaaacatctgcccatacgcacgataattcggtactgtgtacggtaaaggcagacccgtcgggacacgaccaccatcatcattaatcctaatggaacacggtttattatcaagttttaatctctaaaaaataaataaaaatgaaagtgaacaaactattgataggcgcattcgcctcgttagccatcttcttagcatcgtgcggtggcgataccaaaacagcaaaagacggacacgcacacaccgagggcgacgggcacgaccacgctacggaacaggtggttgaaaaacctgccaaaaaaattgcagctaaagacaggaacgaaaaaggcgagctgattgatgcgcacgggcatttgattacaggctgcccaggtcataaagaaatggtaggttcagagggcgatatgtgcccgaaatgtgagtatatgactatgatacctatcacttgggacattaccggggttgataccgtaagggtaacaacattggctgactataacccgcctgctgacaaactgaaaaaataatgtagaacttagctttattgcgtttgctaaaacggtggttccttaattggggttgccgtttttttgtgcccgccacatccgtaaaaattacaaatcttagcagtcatatcgcactttcaagcccttagccgataagtagatttgtatatggtctaacttttacgggaggtaatttcctaatgacgaacaacgatataaaaaatgcgaaccttgtccgaaaatccattgaaaacataagggcggttttaacggagaagaacatacaggacgtgaaaatatccgacattacatcggttgccaaaatctccagaagcaaatttttcagcttctttggcgggattaatacgctgttggaactggtgctgaccgaggaactggtcaggagctatgaactgattgcgttgagcatcaaaaatcaggaggacaaaaagaacttagaggtagaaatgagcctgctgcggattatctacatcaggaagaaccgcatactctataattactacaaaatttcggaactcttaccgagccgatacgacgaactgaaagaagccctatccattaaggaacaaaatttgcagtcggatatactaaaagagcacggtgtggaacccaacggtttaaactggaaaaatgcttttggcgtttactaaagtaaacttaaaaagaaccaaaccgggcttcaaatgttttaaatttagtaatcacaaaaattaagagatatgatacagactaaattccaatcgtgtatagaagcctgccttgactgtgtggctatttgtaatcagtgtgccattgcctgtttaaacgaaaaagatgtagcgcatctgaaaaagtgcattcagcttaacctcgaatgcgttgccatttgccaggcggcagccaacgtactaagccttgacgggaagttgagcaaagacatttgcaaactttgtgcggatatttgcaacgcttgtgccgaagagtgcgagcaccacgcaggtatgggtatggagcattgtaaagaatgtgccgaagcgtgcagaaaatgcgcacaggcttgtgagaaaatggcagcttaatactgtccttaccgtttcatacaaaatacagagggttcttgcagccctctttttttgtgccctgcccaatcagtaaatatcacaaatctaacaaggaaaaacgtaataaggaaccgccccgatgtgcggaaatttgcactatcagataacaaataaaatctcaaatagaaatgaaaaagttagtgttagcattgtcggtaatcgcatttactgcctgtaacaacaatcagcaaaaagaacagaccacacaggagagcaatcagcctgtaacagaagaaacgattgccccggcagaaacagggaacgaaaatgtaattaccattagtggcggcgatgatatgaagttcgacaaaaccgaactgaaagccaaagcgggcgaaaccgtaaagctcattttaaagcacgtgggtaaagcaccgattgaggcaatggggcacaatgttgtcattcttgcccagggtacagacttcaacgcttttgccaatgctgcgatagatgctaaggacaacggctacatacctaaaggaatggaaaacgccgtaatcgctaaaacggatatgattggcggcgggcaaaccactgaaattacctttacggctccggctaaaggttcgtatgatttcctgtgctcgtttcccggtcattatatctatatgaaaggcaaactaatcgtagagtaacacggcaatttcaaaatcagtaaaaatcacaaatcttacaaggaataccataatagtaacaacccgtttaatacggaaatttgtataacaataaaaaataagttcaaaatgaaaaatgtagaattaagcataccagatatgcaaagtgcacactgccagtcaagagtaaacggagcaatcaaagacattgacggcattaaagtagaaaaattggaagcaggaaaattatctgtttcggttgaaaacgacgaagtaaaagaagagttggttgaggcgattgaaaaagcaggctacaaagttggcggcgatgacagcgataaggcttcaagttgttcaacaggatgctgcggataagttttgggcagtcccggagagtgtacgcaggtacatcttcgggattttttaccaaagctactccagcgtatgaaacagttaaaaacctcgttccataaattgaaagctatgttacatcaacaaaaatcaggcgactgttcggacataatgacgaaagtttgcaatgtagcagaccggattatacagaaccgattggacacaggtacatctgcaccgtttgccgtgcagcttacaaacgaactgaaaacggattatcagcagttgaacaatctgtttctcgttaaatgcgatatgagccttgaaattatctatatcaggcgcattatcgaaaaggtaaaagagttactggtgtacaccgagcaatcgctgtcacaaatcgcaaaagcgttaggctatcagaagcctacggaactatccgagcaattaatgacctacacgggattaacgtctgcccattttaagcagataagaaaaaacaagctcgaaatcataagaagacaacaggaaaagcaaaacgaactataattgtcagaacagcaaacttttaaatagaagtcttgatgaaacctcgctttgtgtacagaagcagaggttttctttttatcagcaatgcaagacaggaaactaccgagggatgaagaaatacacgtggcgaacacataaaattataaaggaaaccgaagataccattaccctatactttgacacggagcagcaggcgtttacctacctgcccggtcagtacctcaacatcaggcttaccgtaaacggcgaactgctcatacgttcgtattcgttcagttccgtgccgtctgacgaatttcccgccattaccattaaaagggttacggacggaaagatgagcaattacatactggataatgcggacaacatcgaagcttgggaaatagaagccccctttggcagttttgttttagaaaagcccatagctgaacaatcccaaattgttttactggcgggcggtagcggtatttccccgttatacgcaatgctgaaaagcgttgaaaacagcagccaaattcccttactggtgtacagcaacaaaacgccggaagaaaccatattttggaatgaactggaaacgatgcaggtagcacaaaagctgaacatctgctattcctttactgcacccgattttatttccaccaaactcaaccacgttgcaggcaggttcaatctgcttgtattgcgttcggtcattaaaagactggttggcgaggttgccgaagcccattattacatctgcggacccaatgggctgatggatttgtaccgggatgcattaacgggtttgaacattcccgaagaccatatccatttggaatacttcgacccggttacggtggatgcgggcgatttggaaacggacggtactgttaaagatgtgattgtaaactattacgaggactactacgagaacgaggaaaagcaaacgtatgaatgcacatcgctcattgaggtgcagccgaagcagtcgcttttggatgcgatgaaagagcaccatatcaaagtggcgagttcctgtaagaacggaacctgcggggcttgttgggcagtaaaaactggtggcgaagttcggatgctccataacggggcactgacagaacaggatatggcagagggaataattttgctgtgccaaagctacccgatgaatgcggatgtttgtgttacggtacagtaatatccatatagaaagagggcaaaattacagctttttatagctgctgttttgcccttgttgttttatcattctttttttagtgccagtttgcggagcattgccatactcatactatcggtataagcaccataagccgtaaccaaaattccttttaaaccgtctttcgaggcaatgccatataccgtagcctcatcgcttgggttgctttcgccctcatagcgatagacctgctcaatctcaaaatcatcaatggtatatttgttaccgccgcagattaaacagttctcttcgaggttgaaatccacgttatacccctcgttgcgtaggttctgtatcgctaccaaaaccgtagcgtatttgtacgttacatttgtcatagtaatagtattttaaattgctgcttaccgttccccactgtcctgtcagaaatcttctttcagtaggtctttgagcttccggtgctgtatgcacagttcggcatacattgttttcagcctgctgttttcttcgtttaaatttaccaattctacaagaatatccatccctaaatccttgtatttgtgtttcagttcaaaaatgttcgtgccgtaaacgccgtatttctcgaaaagctccagtccgcttttgccagcgttgtaatctttcagcacctttaaaacctgatgttcgttgctctttttgttcttcatttatacggatgttgtctattacaaaattccgtaagatggtcggaagtagctatgtacttttccttgtttagtttatgatatttaatgttactgcaccgattttcataaaatttcacaaaacaaagccggaatatcataatagtttgtcgggggcaaatgcagaattttgaccattgaataaaggaacttatacattttagaagctatgacactattaataaaaggaatggtgtgcaatagatgtacctatgttcttgaacaggaattgacagctttgggttatgaggttttagatataaaactggggcaagtcatcataaaagatacggcagacttttcgcagaagttgggaacaatcaaaacgatgctgaaaggcatcggcttggaactgatgtacgacaaaaaccaaaagacgataaacaggataaaagagttggtggagaaaggtatcacgttgcaactgcaaagcggcacgcctaccaaattcacaaccttaatcagtggcaagctgcacaagaactacgatacattgagtgccttattctcttcggtggagggaataacactcgaaaagtacatcattcatcggaagattgaaaaggtaaaagaccttttggtacataccgaaatgtcgctgaccgagattgcccacgtactggggtacagcagtcaggcatacctttccaaccagttgaaaaaacacacaggctttacatcaagctatttcaagcaggtaaagcagcaacacgggcaagccgttactatgcagatggacgaagcgcaaaccccgcattaagggtttttcaatccatcccccaaacattttgctgttttttaatgcgagcaccggagctactgaaacatcagtagctctgtttgtttcaggcagataccaccaaatcaaaaaagtaaatttcacaacttttacccgtcatttcgtatggctgcaccttagctgtaacccgacctttgcccctgtatttaaaattttcaaagtttaactaaacaaaaaagcgtaacaaaataaatgtaagatgagaacaagtaaaattggtttgttatccctcttccttatcggagccggattgatacagagttgcaaacaaaaagaagaaaaacagttaaaagatgagcctccggtagtaaccgtagccactatcaacagttcggaaacccagcaatccgtttcctattcgggttccattgttcccgacaatatgaccaccgtaagttttgccgttcccggcacgattaacagcgtgggtgtgaatgaggggcagcgagtgagcaaaggacagttccttgcaagcattgatgccaccgagtacgaagcggcattgcagattgccaatgccagtttagagcagagccaggatgcgttcagaagatttgatgaactgtacaaaaaaggaagtttccctgaaaaggattacatcgacatcaaaaccaaagtagcgcaggcagaagccaacaaaaaaatcaaccgcaagcgcattgccgacagccgtttgcattcgcctaccaatggtatcattaccgtgaaaactgccgaggttggcggtatggcagcaccgggcgttcctgcctttaccattgtaaaaacagatatggtatatgcgcagtttgccgtacccgaaagcgaaatcggcagctttaaacaagggatgcaggtagatgtgaacattcctacactgcatcgcaatttcacgggtaaaatcacaatcattaatcccgtagccgatgaaatttcaaaagcatttacccttaaagtacgcttggacaatcctggcggcgtgctgatgccgggaatgattaccgaagtgcttgcaggcgttccggtaaaggttaagcaggtacgtgtaccgcttaccgccatcatcaacaatgtagataaaatcccgcacgtgtacgtggtggataagaacaacacagctaagctgacaagggttacagtgggcaaaatcgtaggcgatgcggttattataaccgatggtcttaacgaaagccagaccattatccttgccgggcaaaacaacgtgaaagacgggcagaaagtaaaagcgcaaactacatcggtaacagcatcagccccaaaatctgaataatttatgaaaagaaagataaacctcattgaagcggcaatgaaatttccgcaagtaccgatagcgattaccgttattatggtgcttgccgggctgatttcattaatgacgatgccgagaagtgaagacccccgtgtaacagttagacaggggcttgttgtggctttctaccccggagccgacgaagagcagatagagaaagaagtaaccgacaaactggaacaatacctgttcggtttcgaggaaatcaaaaaagaaaaaacgcattccgaaagtaagcccggacaggtcgttgtaacggtagaattgcaggactatgtaaaggacaccaaaaaattctggaatactttacagcacggtttggatgccaatatgcctttagcattgccacggggcgtacagggaccgtatgtgaacagcgatttcggcgatgtggtcgttcagatgattgccgtatcagcccccggtcgttcttacgcccagttggaaaactatttggatgaactggaagacggtattaagacgataccgtccgtttccaaaatcaagcgttatggcggacagaagcagcaggtatttattaccctgcgtgaagacgtattgaagcagtacggtttcggtatcaacgaaatcacaaacacattaagccaacagaatgtaactattccgagtggcgatattgaaattgacaaaaaccgtttcctgattttcacggatgcacagtatcagaatgaaaatgaaatcgggaacctgattgtatatagttccccgcagggcggcaatatccgtttgcgggatatagccaacatcgagagaagatacgaagacctgaaaagcaaaattaccgtttcaggaaacgatgtaatgatgctgaccgtagaaatgcagcccggacagaacattgtcgatttgggtaatgcgctgacacagaaagttgctgaagtaaaagaaatcctgccatcagatgtgcaggtcaacaccattgttgaccaacccgaagtggttgatatgaatttgggacatttctttatcgagttcggtatcgccattgccgccgttatcttggtcgtaatgctcctgctgccgttcagggttgccaccatttcagccattgcagcacccgttaccattgccgtaacatttgctatcctcaatttgttgggtatcgaaatgcaccaggttagtttggcggcaatgattatcgtactggggatggtggtcgatgatgccattatcgtagtggataattacatcgagaaagtggacgaaaaaataccgtcgtggactgccgcctggcagagtgccacgcagttaatggttcccatttttacggctacgcttaccattgtcctatcgttcctgccgttggcatttacgcttaccgggcttacgagggagtttgtgcaatggataccgattaccgtaagcatcgctttggcggtttcgttcctggtagccttgttccttacgccgtatatgtgttaccacttcctgaaaaaaggattgaaaaagcacgatgataaacccaaaaaacgcaatttcttagaccggatgcaggacggtttcgaccgggcaatcgagttctgtatgaaatggcagaaaaccacgttggtagcaggtttggttatcttcttactgtctttcgtggtaggtagtcaggttaaaaccgaatttttccctatcgtggaaagaaaccagttcaaccttgaattgtggatggataacggtacgaatatccacgaaaccgaagcagccgttaagaaaatagaaaaggaaattgcaggcgataagcgcattgtaaacaccgcaagttttatcggtacaagctcgccacgtttctactccacctatgcaccggagcacccacgggaaaactttgcgcaggtattcatcaataccacaagcaaagatgcgacagcagaaatgatagacgagtatgtacagaaattcaacaactacctgccgaacggttatgtacgggttaggcagctaagcaagaagcagcagcccgcaccgattgaaatccgtgtgattggcaaggatatgaccgagcagaaaaaggtagccaaacaggttacggcattactggaaaacactaaaggttctaactgggtgcgcaccgattatcagaatgattatgtagggctgaaagccgtggttaaagaagatgtagccttgcgtttgggcgttaccaaagcgcagatagcacaggcattgggagctaagataaaaggctacccggtatcgcagatgtgggagggcaataaagccattgatattgtattgcgtacagacgaaagcgacagggaaaatctggatgctttaggcaatatgtacatcaattcaacactcggtgctaaggttcctctaaagcaggtggtagatttacaaccgtcgtggcacaccggggctattgtacaccgtaacgggttaagaaccttaaccgtttcttccgaagcgcagttgggcagaaaacccgcagaagtatttgcagaagtacagcctaaaattgacagcctgaaactgccgaaaggcattaagattgcctacggcggcgagtatgaggatggactggaaagcggtcccaaaatgggaaaggcttttatgataagtttcgttctcatcttccttgtgctgttattccagttcaagcgtgtgggtaaagtattcattgtactggcttcgttcccgttaagtttactgggcgcaatgttaggcttgttccttacagggtacgagttcgggtttatggcaatcatcggtattaccgccttactgggtatcgtagtccgtaacgggattatcctggtggactatgcagatgaactggtaagggagcacgggcatacgattagagaagcagccctgtttgcagctaaacgaagaatgcgaccaatcttccttacatcaatggcggcggctatcggtttgataccgttaatggcaagtggctcgccggaatggggaccgatttcaagtaccatttcaatcggtattctggtatcaatgattaccaccttatttatcgttccggtactgtattacaggttcgtaaaaccacctaaaaacaaacaatcggatgaacagcacgagcgcaataccgataccgatgttcaccaccaaaaatatttatcataaaaagggattatgttacagaaaagatataaaacagtcataaaggtttttatatgcggtttcgctcttttgcagggaacaaacaacctctttgcacaacagcagctaacccttgcggaaagcaaagaactggcattaaaaaataataacaggataggcaaagccaaagaagacgtaattgccacccaatcagacaagctgattgcggatgtggcaggcagaccaaaattggatgcttcggcaaccgccttttactttggcgagccattaaacacgatgctgcccgaatacgggtttgcaccgatggtcagcgtaacacagccgatttacacaggcggtaagattaagtacggcaagcagatggcagaaaccaatatacagatgagcaatgcgcaacaacgattggtggaagacgaagtattactggctaccgaaaccgcttactggcttgtagtgcaggctaaggaagaaatcaaactggaacagcaggttaaaaagcaactggcttcgcattacacattcctgaacaaccagtttggggcaggattgatttacaaaaacgatgtattgcgggcaaaggtgctccagaatgaaaacgaagcccgtttgcaggctgcggagaataagctcatcttggcaaaaagaagattgagccagttaatcgggatggaagaccccacaggtatagacgtagccgatacattgagtacgggcgacttttctaaacagggtgttttggaggctgccgatgcgaaccgtccggaaattgaattggcaaccaatggtattaaaatgagcgagcttaccaaaaatatgctcaaagccgacctgaaaccatcggtaggcttatcgctcaacgggatggctgcctttggaaaagagggcattaactttggcgacccaactaaaaaccatatgctgacctacttcggtatgctaagcgtgaaaatcccggttttcgactggggcagcagaaaagaaaaagtaaaacagcaggaagctaatatacgttcggctgaatacggtctgaaagaactgaaaagccaaatcacggtggagattgagcacgcaatgcttaacctgcaattgcaggcgaacaacattgatttgatgcaggcatcattaattgaagccgacgaaaatttaaagttgagcaatgaccgctttaaagccggaaccattaccggggaagatgtgctgatagctgaaacgctttggcaaagagcatacagcaatatgttggatgcaaaaatacggtacaagatagccgaagctgtgtaccacaaagctacggggcagataaaatagtttttgttggagtgagatacacacaatttgcgggggcggtaaaaagcccctgcatttttaatggataatacgatgatataaatgcaacacgataccgccaataaaaacggaatgataatgatacccgacatttcaggctttacggatttcgttatcaaatcaaatatgtttgttggcaaatacataacagaaagcctgctcaaatcagtaatggatagcaatatcgtttgtcttgaaatttcagagattgagggcgatgcgatacttttttacaagtaccaaaacctgcccacctttgaagaaacattgatgcagatagaaaagatgtacaacgattttcaaaaggaatgcaaacgcctggcattacaactggcaatcgaaattcctttatcattaaagataattgtacactacggggaatttaccaaatacaaaattgggaaatttgagaagctctacggcgcaccagtggtagaagcccacaagatgctcaaaaaccatattgcggaatacccgccctatgcgttattttccaatgcctttttggaggtcaatttcgaccaacccgaaaaagcaaccgttgcgtatgacaactgcgaagactgtaaatacctgcccgaaataggctatatccattacctttaataaagaggctgtttcaaatctgaaacagcctcttcgttaaaaaggaaaatgaatgattataatgtgcctctgcgttcctgctccctttcgatagactggaacaaggctttaaagtttcctgccccgaaacctcttgcgcccattctttggataacctcaaagaagaatgtagggcggtcttcaactggtttggtaaagatttgtaacaaatagccctcttcgtccgcatcaatcagaatacccaactcctgcaattccttaatatcttctttaaagcggtgcatatgcgcttttaagcgttcaggaatggcatcataatacgcctgtggcggtcttgacagaaattcaactcctcttgatttcaggtcgtttacggtctttactatatcatccgtagttacggcaatatgctgaacgccctcgccctcgtaaaattcaaggtactcttcaatctgtgatttctttttgccctctgcgggttcgtttatcgggaatttaattctgccgttaccgtttgccattactttagacatcagggcagaatattcggtagaaacctgcttatcatcgaatgacaggaagttttcaaatcccattacatcctcaaaccattttacccaggtgtccatttggttccagtccacattgcccaccatatggtcaatatatttcagtcccgcaggcgcagggttatattcggttttccattgctcatagcccggcataaatataccgttgtagtttttgcgttcggtaaacataaaaatcgtttcgccatacgcataaatgcccgattgtaccacttcgccgttttcatcggtagttacagttggttccatataggctttagcacctcttttcgtagtttcttcaaaggctttgcgggcatcttctacccaaagacccactactttgatgccgtcgccgtgcttctttacgtgttcgttgatttcggaattagagcgcatcccggtcgttaataccagtcttactttgtcctgctttaccacgtaagaagccctgtcctgtaagcctgtttccagtccggcatacgccaacgactggaacccgaaagctgatttgtaatagtgagcagcctgcttcgcattgcctacataaaattccacgtagtccgttcctaaaatcggtaaaaagtcttgtgcgccctcgaatatcttatccaagccatattcgacgttctttaaatcgtttgtcattataaatgatttttaaaaattatgttatgtgtgattttgcaataaagattgttgcacaaagaagatttgtgcaatcgtgttggggttgggaacccggagctacaacatagcccgatgcaaaaccgagagaaaggttttgatagccattttataatcagttagcgttatacttcggtaaaagtattccgcttattctgaaccgtcactataatcagtaaaagtcataaaacaaagccggaatattacaagcggaaccgtttgtgaaatgcaatcagtaaatatcataaatcaaacaaggaatttcacaaacagcgtagcgcattatctaccgaattttgtatcaacaaaaacaaataaaagttcaagacaatggaaagcaaaaatcttcaattcaagacaaaccttaattgcagcaactgtgtatcaaaagtgcaggcagatttagataacgcaggcggtatctgcgaatggaacgttgatacgaccaacgccgataaaatcctgactgtaaaagcagagggcattaccgaagacgaggttgttgccatcatcaagaaaaaagggtttaaagctgaacccatttcagaataatcagccattcactcattattaaaaaggataaaaaatgaaaaagttaatagtagcaatgaccgtaatgttgtttggattttctgcctttgcgcaaaatacaggcaacctgctgaacaactacatcagcgtaaaaaatgctttggtaagcagcgatagtaaagcggcaagcaccgccattagcgcactgaacgaagccgttaagagcgagggcgattttacacagaaagcagaattgcagaaagccaccgacaaattaagcaaggcaggtaacaaccttgaaaagcaaagagccgctttcaacgatgtatcaaccgtactatggaaagtggtaaaatcatcagacaaagtaaaccaacccgtttactaccaatattgcccgatgaaaaaagcatattggttaagcaaagaaaaggagattaaaaatccatactacggttcttctatgcttacctgtggtaaagttgccgaaactaaataataacccacaaaggcattgctgaatgggcaatgccttttaatctttataaccaatgcgatttttaaaatggataatcaaaaatttctttacaaaaagctgttgccgctaaccctgttggcactctttatatcacaagtcagcattgcacaaaaggtagttcattacgacctgtatgtaaaagatacgcttgtaaactatgcgggcaaggaaaagagggcaattgctgtaaacgggcaaatcccgatgcccacgcttgaatttacagagggcgacacggcagaaatcgtagtgcataaccagttaaaagaaagtacatccctgcactggcacggcttgttcctgccgaataaggaagacggcgtacctttcttaacgcaaatgccgattgagccgggcacaacttatacttaccgatttccgattattcagaacggaacgcattggtatcactcacattcgggattgcaggaacagattggaatgtacggcagctttataatgcacaaaaaggctgacgataaaacatttaggacaggaattgacgatttaccggaaattcccattatgctaagcgaatggacgaacctgaagcccgaaaatgtacaccgtatgttgcacgcagcaagcgactggtttgcgataaggaaaggcgcaacacaaagctacgccgaagccattagaagcggtaaattcaaaaccaagctgaacaacgaatggaagcgtatgttggcaatggacgtgagcgatgtgtattacgaccgtgtaatgatgaacggtaatcatcataccgatttaaaaagcattgacggcaagcccttaaaagcaggcgacaaagtacgtttacgcatttctaatggcggtgcatcgtcttacttttggctgcgctacgcaggcggtaaaattaccgtagtggcgagtgatggtaacgatgtggagcctgtggaagtggacaggctgattattgccgtatctgaaacttacgatgttgttgttaccattcccgaagacggcaaagcctttgaatttatggcaaccaccgaagaccgtacccaatccacaagctattttattggcaacggtacaaaacaattggtcggggaaatgccacgcctgaaatattttgagggtatgcagatgatgaacgatatgatgaagatgaacggcgacctggacgatatgggaatgaatatgagcctgaaccaaatggatatgaacgtagtgatgtacccggagattacaggcgaggaaaagagcaaaaaaaataaggatacagcgccgtctatggagcatcacggcgaccataagatgaatagcgacgaagaccacaaccgttataatgccaatgcgttaagcgacattaaaacgcttaattacgcaatgctgaaatcgccgcataataccacgcttccggctgatgccccggttaaggaactgaaatttacattaacgggaaatatgaaccgttacgtttggagtatggataacaaggttttggcagaaacagataagatacctgttaaaaaaggcgaagtattgaggattacgatttataataactcgatgatgcgccacccgatacacctgcacggctttgatttcagggtgctgaatgagcacggcgaaaatgcaccgatgaaaaacatcatcgacattatgccgatggaaaccgatacgattgagttccttgccaataccgagggcgattggtttttccattgtcatatcctgtatcatatgatggcgggaatgaaccgggtgtttacagtggacgattataaaaatcccgaattgcccaacaaggctaaagcctataaaatgttacagcgtgaaagcaatatgccgcatttaatggcgcagagcgatttcgctaccaatggtatagacggggaagcaatgctgatgaatgcccgttacagcttaggcacggaatggcgtttaggttacaacgatatgcacggttatgaggtggaaacccatttagggcgttacatcggtaaaatgcaatggctgatgccttttgtcgggttcgactggcgataccgcagaatgggtatggacgagcacgagaaaaacctcttcgggcaggtcaataaaaaagacaaccgggctgctgtgagcttaggagtaatgtacaccttgccgatgttggttaacgtacaggcagaagtttaccacgacggtattttcagggtatcattgatgcgggaggatatacctatctccagacggttaagagccgggtttatggtcaataccgatttggaatatatggcagacctgcggtacatcctgacaaggcatatcggtatcagagcgcactatgatagtgatatgggctttggtgcagggctttcgctcaattactaaaggattttattcataaaacagacaaaggttgtagcggttatgctatgacctttttgcatttactataccgggctaaatcagtaaacctcacaaatcaaacaagaaatatcacaataggcagcccgaagcaaattgccaattttgcatcataaattttaagattatgacagcaaaaataaaatggaacaacgtgtatctcctgtttacctcgcaggcattgttccagactgcatccatattggtcattacgctttcgggtgtggtaggcttacaaatggctcccgataaaaatctggcgaccttgccattggcaatgattaccgtaggtacggcaggtatgatgatacccgcatccctcattattagaaaattaggtcagcgcaatgcctttatgataggtacactgataggtgttttatcgggtttggtttcgtggtacggtattatccaaaattccttttggctgttttcagtaggtaatatgctcattggtgcttatcaaggcttttcgcaatactaccgttttgctgcggctgatgccgttcccgactatgcgaaaagcaaggcaatttcttttgttattgcaggtggcgttgttgcggctttcgccggacccaacttagcgaggtttacacagcatttaggggcggttccttacgcttattcctacttttccattatcttgttaagcgtggtcgctttgggcgttgtttcctttttaaaattgcaaagaacatctgcggtacaaaccaatgaagcagttaagaaaggtcgcccgttaaaagaaatcattaagaataaagataccatacttgcaatactggcatcatctaccgcatttgccgtaatgggaatgtctatgaccgttaccccgatagcgatgcacagcgtagggcattcgtccgatagttccgcaacggttatccagtggcacgtattgggtatgttcctgccgtcattctttacaggtatgctcattcagaaattcggcgtttaccgtatcattatttccggcttggcgattttgttcctgtacatcatcattgccctgatgggaacaggctttgcgcatttcgtttccgcattgttcatcgtgggcttaggttggaacttcctgtttatcggtggctcatcattgctgaccaaagtgtacagacccgaagagaaagaaaaaacacaggctttccacgatttcacggtttttgcagtcatcagtattgcgagcttctttgcaggtagcctgttcaattactggggttggaatggcgtaaacattgtactgatacctatgcttataatcacattgatagcggttatcaggattgtaatgagccaaaagaaaagcgttagcaatcagtaaaaatcgtaaatcaaacaaagaatatcacaatagatacaacccatttaatgcggaaatttgtattgtaataagagagataaataaatgaataatttaaaaaccatattactaagcacggttgtttcactggcagcgttatctgcctgcaacaattcagaaagtaataataaaaaatcagaggatatgaatgcacatcagcacgcaaatcacgacagcgcatacgcttgtccgatgcacccggaagtaaaaggaaacaaaggcgataaatgccctaaatgtggtatggctttgacccctgttaataaagagaaaagtcagtatgaagtaaaagtggctgccaacccgcaaaatgtggaagcaggtaaaccaactaatctatccatcgccattagtgaacacggtaaaaatgtgccgttggaagtagtgcacgaaatgaaaatgcaccttttggtagtgaatgaagaactgacctggtttgaccatatccaccccgaagaacaggcagacggttcttataaggtttcagaaacattcccagcagcaggtaaatacctgttatttaccgactacaaaccgaacggagccgagggagaggttaataagcaaaccattgaggtaaaaggtacggcagcaatacaaacagccgatttaaagacaaaattggtttcaaccgtagatggttttacggtaacactacttaacggcgaagacttcaaaacaaacagaaatcagggcttgcaattttcggtagaaaaagacggcaagaaattagaggaaaaggatatgcagaactatctcggagcgactgcccatatcgtaatgataggcaaagccgataaagattttctacatatacacccggtatcaaaagagaatttcccaatctatgccgaaacgcttatcaaaaaagcagggctttacagaatgtgggtacagttcaaaataaacaacgtggtacatacggcagatttcacgattaccgtatcagagggcgaaaaatcggcagaagaccacagccaccacgcccacaaacattaatagtctgcaacaggaaaacagtaaatgtcacaaattaaacccggaatatcacaatagcagactttgggattatgttgaattttgcgacagttcaaaacaatagtaaataaagtttaaaaaaatatggaaaatacagaatttcagttcaagaccaatcttaattgtggcggttgtgtatcaaaggtaaaagcggatttagacagcgcagacggtatctgcgaatggaatgtagatacagccaataatgacaaaatccttaccgtaaaatcagagggcataacacaagatgaaatagttgccattgttaagagaaaaggctttaaagcagaaccattagcggtttaatctcttagccctatccggtttctaataaaggatagggctttctcataccctttcaatacatactaaaatgaggcaattattgtaggctaactgcaattgctgcctcattttatcctttttattggtttcacttaaataccaatttctatgatagattattgccatactataataaacgaattagacgacagaataaatgaattgacctatgagccgaataattctttggtagcgtatgaaaatgctattgtactggtattgcagaagctcgaagagataaagaagtatatcaagagaaatggctttaaagatgatgatgaagaaatactatttttcaaacagctaaagccgcagttagtatctaagctcatttacttcaatgcgatttacaagattgaaacgaaaagaccacgtggaggggataaaaccatcaagaaatatcttaatgtagagctttccaaaatcaagcggtattttgatgccaatctggaattttacaagtattacagaaccaacagcactcacctcgacaataaattctttttgcgaggcaagcacgatataaagttgagtttagacacgtattattttgaagccgaccataatttcacaacctcacacgattacaaggtagctaagattattgccaacgacttgatacaggtttacctcgaagaccagttgaacaataacaaccacagaaagctacttgaaatcccgcctttgaactggacgggcagcaaaacttcactcattgagttgatttattcactgcattcgcagggttccattgacaacgggaacaccgacattaaaatcattgccaagacctttgagaatatgtttaatattgacttaggggatttctaccattcctatttggaactgaaaggcaggaagataaaccgaacaaagttcctcgatagtcttcgggatgcacttatcaaaaggatggacgagcaagacgaaaaataaaggtaaagtttcactgctttacctttattttttataaatttgcagtaatgatttacaaggtaattgaatgaaagcaagtgtagtaagcaccattactaaatcgttaccgataactctttcggttcttgtaaactactctttattagtcagttttgactaaattaatctttttatgtaaaaactgaaagtcttccgaaagttgaaaacgaaattgaagccgttgtctgctggctggataaaaaggaattaaacgaaggaaacaaatatttcattcagcataaaagcaaacttttaaaagcgattatcaaagaaatagaatataaaatagacgttaacactttagaaaaaacgccggtttctgaaagcataaaattaaacgaagtcgtaaaagtccgtttaaaaacagcttcaccactggttttcgacagctttgaggaaagcaatgcaacaggcaatgccatattgatcgacgagacaggcaattcaacggtgggagccgtaatgattttataaattaaacaaacataatctgagtcatttaggaaagatttaaaaaggtaagttgatttaaagtgaattttcttagctgtataaatatttcagtagtggtttaaaacgatagaaaacataaaaaatggttatttcaagaaaagttcagttcaggttaaatgtattttttgtgacgatcgcacttctgtcggttgttgcctttacgatgtatgaactgggctatctggatgaactgttcactgttttagccaaagacaattacattttctactggatgatgttggtaggagttttggcagaaatcgttgcgggatcaatgggaatgggatacggcgtaatctgtacgaccacgcttttgtttctcggaattccgcctcatgcggtgagcgcaagtattcattctgcggaaagctttacaacggcagccggaagcatcagtcatatcagactgaaaaacgtaagcaaaagtctggtgaaaagacttgcgattcctgcggttttcggagcagtgatcggggcggttttgctcacatatctcggagaatattattcaaaaatcaccaaaacaattatttccttctacacattatatctgggaattcagattttatccaatgcttttaaaaataagcaggacaaaaaattaaaacgtaaaacaaatttaacgcgtttgggagtgatcggaggttttattgattcctttgccggaggaggatggggaccgttggtaacgggaactttaattaaaaattcctttacgccgagatttgcagtgggaagttctacggtggcaaaatttattttaaccttaacagcagccattacttttattttcacattgggaattcagcattggaatatcattctcggacttctgatcggaggaatttttaccgctcctttttctgcgatgttaacggcaaaacttcctgtgaaaagtatgtttatcatcatcggaactctggtgatcgtgatgagctcgattaccatttataaatctgttttttagtgataaaatctgttaaatgtggaaaaataaaagcatgaaatatcttttcggttttgaaaatattctacatttacaccactaaaaaaataacaatgaacataaacgtagttgcgcttttcagatttaatgagaattatctgatggaagcagttgaacttttccagattctggtaagagaaaccagaaaagaagagggatgtctgcagtatgaccttattgaagacaaagataacaaaggaacttttttcatggtggaattgtgggaaagtgaagaacacctgaaccgccacaacgggcaggatcatttgctgaatttcagaagagacgtttctaaaatgctggaaagttctactcaggtatttaaaggatttaaaactctgtaaactgtaagaagaaagttagtcacttaaaaataactttactcttcctgagggaagcataaactaaaaggctgttcactattgaggacagccttttattagaaaaaatagaaagtattatcaataaagctcctgtgaacttttgtgatcctgtgaaaagtttattttttaatgaattttgattttacgatttctccttccgccgtttcaatcaggatataataaactccggtttgaagcgtactgatgtcaaacgagcttccggataattttccttcggctattttctgacctcctgccgaatagatctgaatttttttcggttcttttttagcaacaaactgcaatgcggtattgtcggaattcacggcaaactgtacactttcctttgattttgcctgatctgaaactgcaagtatcgaacttgccgcataagaaatatcatccaactgaatcgctgtgtgattaagacttcctacaattctgaaggcaatatattgtttattggatgcaggaatcggtacggaatacagcgtgtctgttgaagtaagcgtaatcgtatttccaatctttgtaaaacttgccatatctgctgttgtaacgccgtccacaaagccaacttcaatagttccggtacttcccgcggaagatcctgctgtaagggaagacttgaacgtaagtgtctgacttccattaggtgcaacaatttgcggggcaatagcataacccggtgtattcgttgtgaaaaagctgtaatactggatatgtttgtctgcagcatttgaattatcaacatatacccacggtccggaaccactctgcacacggttccagttattttgtggccatgctgcacctgttcctgccgtaaaagattcaaaattttcattaatcgttgttacctgtgcatttcccgaaatcgctgtaagcagtaaacctccaataagtagtcctagtttcataacattatttttatttagaattattctacaaaattatataattatttttaattgttctaaataaaatattatatttgtcaaaaattttttgatcctatgaagaagaaattgctttctgttcttgctttaacgatgattttgtggatggacgcgcagaaaaaagattctgtaaagctggaaaaaattgaagaggttgtccttaccggacagtatactcagcaatccattaataaatcaatttacaaagtggaggttattgatgcgcagcagatcaaaaatatggcagcaaccaatgtggcagatgttttaaaccaaagcctgaatattctgattacttcagaccgcaattccggaaattcaacggcgagtttactgggactgggtggagagtataccaaaatcctgattgacaatattcctgtggtgggagatgtgggactgggaaacaatatagatcttaccaaactcaatatcaataatgtagaacgtattgaagtggtaagcggttcaatgggagtggattacggaagcaatgccgttgccggagtcatcaatatcatcaccaaaaaaagcactcagaaaaaattaacgttaaatgcctcggttcaggaagaaaccgtaggaaaagaatacaactggtacaaaaaaggagagggaagacatatccaaacgctgaatgcaggatataacttaaatgaaaactggtacatcggagccaatatcaatcataacgattttcagggattcaaaggaacacaggaaggatataagtattttgaacaggacggaaaaagaggatatctgtggcagccgaaagatgttctgaatatcgacggagtaattcgctacagtaaaaataaaacttccgttttctataagttcggcttcgttaatgaaaaactcaatttctatagcccgattgtttcagagctttatttaggagagggaaacagaacctatacttctgccgacagagattatctcaccacaagatacgtcaatcagttaaatgttcagaccaaattaggcagcatcaattataccggcgatttttcttatcagactcaggacagaaaatacagagattttacctatgacattccgaacaggaaagtaatgggaacgaaagaagcatatcagtcctataacaaagcagatgtcatctattcacgaggcgttttcagcaattttcttgatgataaaaaaatagatttccagttgggatatgaactcgatcataccaaaggatacgcaggttttattgcaggagattttgcaggaaataatgtcgaccgaaaaattttcaactacgccaattttatttctgcagaatggaatcctacagactggctttcattaagacccggttaccgtttggcgctgagtgataaatttgatacacagcacaattattccttaacggtaagaggtaaaatagatgattccagtaatatccgactcgttgcaggaagcgcgaaccggtttcccaattttgatgaactctacacctattttgtagacagcaatcacgacatcagaggaaatgaagatttaaaaccggaagaaggaatcacgatctctttaaacggagacaaaaaattcaccaccagttcagaatggaatgttcaggtaggagcaagcgcaacctacatggatctcaaaaacaggatagaagttctgcagatcaatcagagtccgttaaagtacaaatacatcaatatcaacaaattcagatcattactttttgaagccaattttaaagttcagaaaaatcagttaagtcttgcagccaatgcctcttattatggcatcggaaaagagctcttttcgggaactctggtttctccagatgatttcttttatacattcgaaggaaaactggctgcaaactataccctaccaaaaaccggaaccaatgtttcgttgttttacagacacgtcgggaaacttcagatgtttgtcttagacagtcaggatattgcccatcctttttattatgtgggagagcgcggcaactttaacatgatggatttcgtcgtaagtcagccctttttcaaaaatcattttgaactcagtgcaggaatcaagaacatttttgatgtttcattcgtaagagacaccaccgttgccggaaccgcacacggaaccaccgatccgaactcgaatcttttctacggcagaagctacttcaccagactaacctacaacttttaaaaaataatcattgaaatgaaaaaaatactgctttacctcttcatcgggacatcattcatcacccagtcctgcattaatgataatgaagatcccgttgccatatcaaaaattgaaggttccatcgtgaatcctaccgttggcggacctacacagcccaatcaggtctggtttgatctgggaacagattctgaagtgctgaccaaaagaaccgattgggatctcgctttgtattcaggaagcaattttaaagtcattcttaattcttctctgatgatggcagcaggaaaaatcccgaatactacaaatatcgatctggtcacagaatctcaggtttccggtttgcaggatcttgtacaggttgcgaatttcaacccttccaacaccatttatattgatgatgtgaaaggaaactttccttcaggatacaccgcaattgaagaaattaatcccaatgaatctgaaaatgcagtataccttctgaacatgggaaaaggaatttacacaggaaatgttcccgcaggaagcgttaccacagccggagaaagcagaggatggatgaaaattcagatctcgagaacttcaaacggaggatataaaataaaatacgccccaataaactcaacctctcacaaggaattaaccatcaataaaaactccgcgtacaactataattttgttagtttgaaaaatgaaaaagaacttttcattcagcctgaaaaaaagaaatgggatctttgcttttcggtctttaccaataccattacaggagctggaagctatgtgtatgcagactttatcaccatcaataatgtaggtggagcaggagcttatgaagtaaaagcttcaggaaccacaaccggtgttgaagcctacaataattttaaagtttcggatatcgatcagtctaaattcatttataacgatcagcgcgttatcggaggaaactggagagaagtcggaccttccggatatcaggtaaaaggggatgtattttatgtcatcaaagatccggacggatattactttaagctgagattcaccagacttacgagcagcagcggcgaaagaggctatccgcagttcgaatacaaacccttgttctaaaaattttaaatcaaataaaaagatatcatgaaaaaattcattcttgccgcatctgtattaatggcagtctattcctgcaaaaaagaaggagcttctactgaaaataaaacagaacaaagctctgaagctccaaaatctgctcataaaatcgtaacgctgaacggcggaatcaccgaaattgtagccgctttgggtcacgaaaaagaaatcgtgggaaccgacgtgacaagtacttttcccgaatctcttaaatcgacagctaaagatctgggacacgtaagatcaatgaccatcgaaccgattatggcggtttctcccaccttaattttggcttctgataaagacatcaatcctgaactgatggggaaaattaaatcttccggcatcaaaacagaaatttttaaacaggaatttactgttgacggaactaaaaaactgatcgcagaagtagcgaaagcagtcggaaatacagattatcagaaactgaatgataaaattgatgccgatctgaaacagattcagccgattgccaaaaaaccgaaagtcctgttcatctacgcaagaggaaatatgctcatggtttcaggaaaaaatacaccgatggcttctttaattgaaattgcaggcggacaaaatgccgtcaatgattttgaagatttcaaacctttaacgccggaagctgttgtaaaagcaaatcccgatgtattattcttcttcatgagcggactgcagggagcgggaggaaacgaaggcgcgctaaaaatgccgggagtttcccaaaccaatgccggaaaaaataaaaaaattattgccatggacggcggtctcgtttccggtttcggaccaagattaggacaggcagcagtagaattaaaccaacttctgattgaaagcaccaggtaaattatccgtttacatcatcataagcaccgtactgctttgcattattgcagtatggtcgcttaacaccggagtttacgatttcggaggtcagtctgcattcgctattttacaaaaaataatgaacggagatcagtcactctcaatgagcgataaatatgtagtctgggacgtaagagcagccagaattgtgatggcgatccttatcggaagtatgttggcggtttcgggaacaggtttgcagggattgttcagaaatcctttggcaacgggagatttaatcgggctcacttccggagcaaccctgcttgcagccattaccatcgttttgggaggatatttcagagaatttcttcctgaagccgtacagttttcattggtgggcattgctgcttttatcgggtcttttatttccatgcttctggtgtacagaatttcaaccagcggcggtaaaaccaatgtcgtgatgatgttattatcgggagttgccattacagcgatcggattttccattacaggtttcctgatttacatctcaaaagacgaccagttaagagatttaacgttctggaatttaggaagtttagccgctgcaacatggaccaagaatatcattttgggaatcgtattggttatttcatacacggttttactgccaaaaggcaaagcgttgaatgcaatgatgttaggcgaaaaagatgcagagcatttgggaattaatgtagaaagattaaaaagacagatcatccttattacggctttaatggtgggaagctgtgtggcattttcaggaaccattggttttgtcgggcttatcgttccgtatattttaagatttttgtttaaatcagactatgctgttattttaccgttatcagcagtttgcggaagtattttgctgttgacggcagatactttcagcagaagtattgtggaaccttcagaacttccgatcgggattttaaccgccttaatgggaggtccggttttcattgcgattttagttaaatttaaaaaatcactgttatgataaaagcgcatcagatcagttatcagcataaaacctttcatattctggatttggtggacgttcatctggaatatggcgaatttctggcaattgtcggtccgaacggagcaggaaaatcgagccttctgagtattcttgccaatgaaattaaatctgaacagcagattgtatttaaaaacagacatatcaacgactggaatgtgaaagagctttcaaaacacaaagccaaattttcacagcacaacagcaacgatattccgctggaagtaaaagaggtcgtgatgatgggacgttatccgtatttcgatgcacagcctaaaacagaagacaatgaatcgacaaaccgaatgatgaatgaaacggatattctgcatttaaaagaaagagaatacaacactttatcgggaggcgaaaaacagcgcgttcatctttcgagggtttttgcgcagcttcagaacgaaattgcccacaaacttgtttttttagatgaacctttaaataatttagacattaaacatcagtacaaagcattggaaatcattaaaaattttaccaaaaaagccaattctgcgattgttgttcttcatgatctcaatcttgccgcacaatatgccgataaagttttattaatgaaatcaggaaaagttgccgcatacggaactccggaagaggttttcaccgctgaaaatatccgcgaagcctacaattttccgtgtacgatctgcaatcatccggtaacttcgcacccaatgattatttttggataatatggatacagaaaaactgaaaatattagcacagaatctcgcccatcctcaaggagaaaaaggaattgagatcggcgaaatgatgaatgaaaccaacatcggaatgacgttggaaagcatacagacccttttaatagaagacaatgaacacattctggaaatcggtcatggaaatgcagggcatgtcagaaatattttaaataaagccattgatgtaaaatataccggaattgatatttcggaaaccatgcatcatgaagcaataaaactgaataaagattttgagaatcaggctgaatttatcctgtatgaaggaacagaactgccttttgaagacaaaacatttgataaaatatttaccgtaaacaccgtttatttctgggaaaaaccaacagattttctcaatgaaatttacagagttctgaaaaacaacggaacatttgtactcactttcggacagcgggatttcatggaaaaacttccttttacgcagttcggttttacgttgtacaataccgatgaaatggaggaaaccgtttctaaaagttattttaaaagaatgaaaatttccgaacggcaggaagaagtaaaaagcaaaaccggagaagaaaccctcacaagaaattatacaattttaaccattaaaaaataaataaatgagcacattagtaaacgatctgaaggaaaaatgggaagctcttaaagctgaaaatccgcatatgagaatccgaaatgccgcagcagaactgggagtaagcgaagcagaactgttggcaaccagcgtaggagaaggcgtaacggttctgaagccggagtttcagaatattttagcagaagtggagcagttaggaaaagtaatggcgcttacacgcaacgaagagtgcgttcacgaaagaaaaggagtgtatctgaacggcgatttcagcagtcctcatgcacagcttttcgtgggagaagatattgatttaagaattttcctgaatcactggaaatttgctttcgcagtagtggaaggagataaaaaaagtcttcagtttttcggaaaagacggtttggcgctgcataaaatttatcttaccaaagacagcaacgaagctgcattcgatgaaatggcagaaaaatataaagcagaagagcagaacggatctttcgattttgaaaaagtagctctgaaagcagaagaaaaaccggatgccgaaattgatgtggaaggtttccagaaagcgtggacagaactgaaagatacccacgatttctttatgatgacccgaaaattcggagtgagcagaacgcaggcgttgagactggctcctgaaggttttgcaaagaaaattgaaagctcaaaagtcgtaaatgtactggaagatgcatcggaaaaagaacttccgatcatgatttttgtcggaaacagaggaatcatccagattcatacaggaaatgtgaaaaagacactttggcatcagcaatggttcaacgtaatggatcccgatttcaatctgcatctggacgttaccaaaattgcggaagcatggatcgtgaaaaaaccgacggaagacggagaagtgaccgccattgaagttttcaataaagagggcgattttatcgttcagtttttcggaaaaagaaaacccggaatcccggaattacaggaatggaaagacctcgtcgccgatcttgaaaaataaattgaaatagttagatagtttctttgggccgttttgttttttacaggcggctttttttaatttaaacgcaaatggcacgaatggtttcacgaatgacacaatgtaacgttgatttattttaatgcgaagctttttttaaacacgaatcgcactaatatttttcacaaatgatacgatatttaacgcgaagaacgcgaagtctttttgatctaattgagcatatttttcgttcgcaagggcacttcgttcagcaaatgatagaactagccactcagctaagacattgccaaatgcaatcataaaacgttcgcttaataacagatgaaatctgaataactttgcttactttaaaatatttaccttaaaatatctactttgcgttaaaataaatcaacgttacattgtgtcattcgtgaaacaatttgtgtaattcgtgtttaaaaaaagcttcgcgttaaaataaacaatagatcattaaaaaattaaagttttatagcgatattagtgatgccatttgtgtcattcgtgtttaaaaaaacaacaaaaaattaaaattatatcgtgatatttgtaaagccattcgtgtttaaaaacaaaattaaaatgaaaaaccttttcactgccttttttcttactgttttctgttcatttcaggcacagcaatttaaagcctatcagttttacgacaaaaaaggaaaatcagtaaagcccgaaaaactcatcagacaactggctgattacgaagtggttttcttcggtgaaaatcataacaactccatcaaccactggttacagcttaaagtgacggaagggttatatactcagaaaaacggacagcttattttaggtgctgaaatgttcgaaagagacaatcagccgcaactgaatcaatatctcaacgggaaaatagacgcgaaaatactgaaagattctgcaagactctggaataatttcacgaccgattataaacctttggtggattttgccaaagcaaaaaaactgaatttcatcgcaaccaatattcccagaaaatacgcttcccaaaccgccaaagaaggtctggaatctctgaataatttatctgaaaaagaaaaaaactacattgcacaacttcccataaaagtaacgcttgaaacaccgggttatcctgaaatgaaagcgatgatgggcgatcacgcagacggaaacaaagtgatgaattttatttccgctcaggcaataaaagatgcgactatggcggaatctatcctgaaaaatctgcaatctggaaaaacattcatccattacaacggaaactaccacagcaaagaatttggcgggatttactggtacattaaacaaaagaatccgaacctgaaaatggcggtgatttctgtttttgaatcggatgatcctgaattaaaagttcctgagaaagactatattcccacagattttaatctgatcattcccagtgatatgacgaaaacgtactgagaaagagccaagtaaaaagtgaaaagtataaagagccagattttacatttagactaaaagtgtctgagaatttaaacagattcttccttcgtcagaatgacaatgagtcgtttaaaagacaatgaggtctgcatatttttcattgctttttatcaattttcaaataggctttaaccaaaatatacaaaacttagcctgcaatatttatctttgcaaaacattcagaaaaatgaaaaaaatatcccttcttttcatctttttcatcggtttgatgaacgctcaaaaactgacaccaaacgaaatttccattatcaatcagggagataaaaattctgcgttgccaatttaccagaccacagacgaaaatcagcacaaaacattattaagcctttcggcagaaatcgatccgttggataaaaatacggcagttttagtcggcagaatgaaagaatctttgctttccaccgatggcggagtgggaattgccgcaccacaggtcggaatcaacagaaaagtaatctgggttcagcgttttgataaaaaaggagaaccgttggaatattttatcaatcctgtcattgtctggagatcagaattacagaatttaggtccggaaggcgatctttcgattcccgatttcagagatcagttttaccgaagcaaagtcattcagcttgaatatgtcgatttaaaaggtcagaaatattcagaaattgtggaaggttttacagccgttattttccagcacgaaatcgatcatcttttcggaattttaatttcagacaaaaaagaaaaagagaaaaacgattcttatcagaaagtggatgcttttaagaagagcgattcagggatgaggtaattcagatattctgtggagtccacattttcagaaatttaaattttttcggatattcctctttcgggcaaaatgccaaagcgacttctctgttgtctagtgaagattccgttagtaaaacataatctgtctcatttttaaaactgttaaattcggtttcgtttacgacacaaactacttttttgaatattccgctgatccattgaatcatattttcgttgtcctcaaattttttataacaggctaaagaagcgtgtgcagtaattacaggaactaatttgtcaggaacagtattcaaaacaatgatgtacattttcatatactagctttttataatttgaaagatataataagttgtttcaacttttattgaactagaaaagatgagagaaatttttattcttttgagaacttcgaatatcataaacgcgttaattttctttgtctcttttgcggttaaaatcgaaattacctaaaaaaatacaatcaatatcttctgatctgcacattcgaaacatttctgatcttaattttttttccggcttttttcagcaaaccggtttcaggatttcttttaaaaaccgtaacattattcgttgccgtattggcggtgattaaaaattgtccgcttggatcgagattaaatgttctcggatgtttcccttttacagattgataaccaattgttttcagacttccatcgtcctgaatcgaaaaaatgacaatattattttcttttccgcggttggaagcgtacaaaaactttccgtccggcgaaagatgaatatcagaactttcaaaatctcctttacaggtttcaggatgggtaaaaatcctctgaagcggtttcaggtttccgtttttgtaagcataaacactgactgcaccgcccatttcttcaatacagtacgcgaattttccattcggatgaaaagtaaaatgcctcgatccggctcccaaagttgtttttacaaaaggaatttcagcttcctgcaaaggcatttttttttcaccatcaaaacgataggcgcgaattttatccgctccgagatcaggcagaaatagataatcagaatccggagaaaaaacggtggagtggatgtgcgcacgatcctgtctgtcgggatttatacttccttccgaaaattgtatattctgcacaaaaggttcaagagttccgttacctgaaatcgggtaaacagaaacgcttccttccgtataatttccgttaacgagccattttccgttgggatgaaccgtaagataaaccggattttcaccaccgctgctttgtttactgatgaactgtaaagattttttattgggattaaattcaaaactgcttacgcttccgccgttctttgttttgctttccgtacacgcaaaaatatattttccgttcggtgacaaagtgagaaaagacggatttaaaatccccgaaacagaagtaatttttgataattttccgttttgcgtgttcaattcatatacataaattccctccgtttctttttcccagttaaaagaaccgaaaaaaacatacgtatgttgagcatacaattgaagacagctaacaattgtgatgaataagatgaaaagctttttcaaatgatgatggtttttaaagaaattctgtttaaacttttttaccgaaaaagatgcaaaagattgtaacactttagtagtttaagtttaatacttaaatggaaaaaagagcacataagtttaaaaaatcaaagattttttctctttgcagacttttgaaatacctttgaataaatccaataaacacttttgtgtactttttgcggttaaatttaaaatgagtttacaacaaacatataaacgtttttcggatgaaacaaatttctgtttaatgtttctcatattactaaacaaaaaaaatctgcttccaaagaaacagattctgatatttataccgtaaaacgctgaattagttattcgtaaccgaaagttttacttcgatattatttcttgtcgcattagagtacggacagatttggtgtgctttttctgttaaaacctgtgcttcctcaatagaaacttcaggaatatttacatcaagctgaaccgccaatccgaaaccgccgttttccaattgtccgatgcttacttccgctgttactgtagtttctccggtttttgctttagacaaagaaatcactcggttcagtgcgctgtcgaaacatgcagaatatcctgctgcgaaaagcatttccggattggtgaaatcgtcattggctccgcctaaagctttaggcattttcacgtccagatcaagaactccgttttcgctttttacgtgtccgtttcttcctcctgttgcagttacttttgttgtatacaaagttttcatttatttttctattttagttaatattttttgaacattttctttcagagctttccagtcttcaggcgatgctccgattttctgaaataatttttccggaattccacaggctttttcctgtaaatttctgccggattctgtgatgaaaacttccaccacacgttcatcttctttttttctttttctttcgataaatcctttattttcaagtcttttaagaagcggtgtaagtgttccgctgtccagatacagcttttcgccgatgctgttcaccggaagtccgtcatgttcccaaagcaccatcatcacaagatactgcggataggtaatatccagctcatcaagaaaaggacggtaaagccccgtaatttccttggcaataacgtataaaggaaagcagagctgattttctaattttaaaaattcgggattttccatgatttctgaaaaatgaagaggttttattttttgatgatgaattcttccatcggaattcttacttttttcatgtgcgacagccagtcgtttttctcgtctctgtatcctaaatacaataagctcacactctttaagcctaaagctctcaagcctaaaatttcatccaccacttcattgctgaaaccttctgcaggagtactgtctactttaatttccgcagcctgagctatggcaagtcctaaagcaatatacgtttgtcttgcggtatgtgcgaagtgttcttcaggagtctgcgcaccgtagatttctttaattttatcggtatagctggaaaatcttcctcttggcaaatctcttacatcggtgtgatgatcgtacactttatcgattttctcatcggaatagctgtcccatgccgcgaaaaccaaaacatgagaagaatctctcattacttcaggattcaacgcaccctgaaccattttctcttttaattcctgattttccactacgatcacacggaaaggctgtaatcccgaagaagtaggagcgagtcttgcggcttctaaaattttatttaaatcttcttctgatactttttttgttggatcgtatgcttttacagcgtgtctccagtttaaatcttctattaatgacattttgttaatttttttatttgaatactatgatgcaaaaatattgccaaattaaattgtgtgcaatttaattttgttaaatttaatttaaaaatttttaaaaccttcttaaaacatcgcaggaatcggattttttctgaggactgaactttccatttttgctgaagaattttaaaccgaaaacaatgcagagatttaaaaacaaaaccgctctgatcacaggcggaaccaacggaatgggattctcaacagcacaacagtttatagaagaaggaggaaaggcaatcatcaccggaagaagtgaagagaatgtaaaaaatgccataaataaactaggcgaaaatgctttcggaattgtttcggatgccggaaaaataagcgatctgatgaatcttagaaatgaagttgaaaaattcacagaagatattgatctggtatttgcaaatgcaggatacggaagatttgcttcgattgaaaatgtggataaacatcattttgacgagcttttcaatatgctggtaaaaggaagtttttttactgttcagcagatgcttcctttaatgaaagaggggagctcggttgtgtttaatacttcttttgtcacagaattcggaatatccaatttttcggtgtattctgcagcaaaagcggcagtgcaaagtttcattaagacttttgctgctgagcttacggacaagggaatccgcgtaaacggaatcagtccgggacatatcaaaaccaatatttttaataatacgggtttaaattcagaacagattgatgaagccgtacaaaatattattcctgccattccttttaaaagacagggagaaccttcggaaattgcaaaagcagtactttttcttgcttccgatgaagcatcttacattcacggagccgaactggggattgatgccggaatatctgtaattaaatgataatgtgatgaaaagattattttacgtctttgatctgtctgataatattggttttattttcaatgccaatatcatattttttacttgtcttaagacttaaagctgccttttcgataagcttggtataatcctgagatttttttgaaagatagaagacctgcgcgctgattcctatggaaacacgggcaaattcctgtggtcgatccggatcatctgtaatatcggtaatcactgaattgttgtaccatgtaagattctgtgaactctgattgccggagcaggaaatgaccatcgttattatgaagagaatatagattaagattttcatgaaaataaatttaaaaaagctcctgcaaaataacaaataattgcaggagctatataaagatttgttagaatccgcagcttgctacacttggagccggaacaggagagcatccggacaatgttgaaaatgttgtcagaacacaattcgtgtttatataattgttgtcataaagcagcgaaccggacggacttctgcaatatacatttcctgctgtattggcataagacgaaacagaagcagaaccgcagcttgtatttacgcaggcatttctccatgcaacatcggttaccggaccggatgtgaaaagggaaggatctataattcttttttccaccacaccggaagcatttttaaagcttactaaaatagctacgtgatatccccacgaaacacagcacgttcctgtagaagctttcaggtttccgtagacgaattgtttttcgcagtcataacctgcattcagaagaatctgtctcattttgtgagctcttgcataacatccgtctactgcatatctgaacgtgatacatggtgaagaagctgtagaagttccgcacgactgatttttgatctgtatgaaaagattgttcagagtcgcctgattcggaattacacttactgctttgctcgtttcgctttgagtttctttggtgaagatggatttgaagtaagtaacatcttcatcggttgctttttcaactttgacaatttcgttggaattttttttcaggaaaacatgaaccggagtttcattttcgaccgctgattgaatcattgagatgaaggcttcattttctttgctgtctttaatttcatagaactgcgccgaaatgatgaaagaaactttcaggacattgccttctttctggatccctaccggaatagtactgccaaagtctctcatggcattttcattggtttcttttacaacaagattcggatcctgattggcactggaatctgaacaggcattagaggaaagtaccatcacaaatgccattgcggatagcagaaattttttcatagttttaatttttgtggttaatgatgtgcagttttattattgatagttcactgcgttgtgattttaaaagtaataaaaaattgaatataaaattcaaaatttttaagaaattttatcaggcattcagattaccgatgaatactggaaaaattaaatcggacgaaagtatttaacgtgagtatgatgaaattaatagggcataaattgatcatgttttatcactcttatcgagcttcagccttgatgtgaagattacaattaaggttaggttaggcaaaattgataataagctttggctgaaatctttctgtttttttatttaacctgagttcgggataagtcttcttaaccgcaaggttaaacaaagagattcaattatcaagaattcagcttttaagatatacaatggcgtaaaacttattaaagtaatactattttgtcttttttaaataaacgaagtgcctttgtttagcttgcaaactttcaataagtaaaaaaatcttttgcttttctttgcgataaattaatacaatactataaatcaattatttaaatttatttcttatcccgaactcaggttatttaagttgtttatagtaaaaatctttgctcctttaggagcagaatctgtgtagaaataagaatcagttcatcaatcaatccgtaggattgatatctgtaattctcaatgaattttctaaagatagcgttcctacggaaagccgaacgtacgtctaatattgattttttaattaaaaatccctgcacatcgcaatatgcagggaaatgttatttagtaaaaattacttagcaataagttccgcttcgaaaacctctgtaaaatgctttcttattttagccttaatatcttccatttcttcagaagtgagttctctttccagttctctttttaaggaagttacctgtttgtctttaattccgcaaggaataatgtattcaaaataacgcatatccgtatttacatttaaagcaaatccgtgtaaagttacccagcgggaagcttttacacccattgcacagatctttcttgcataaggttttcccacatccagccagacacctgtttctccgggagaacgttcgcctttcaatccgtattcggcaatggttctgatgatgacttcttccagatttctcatgtatttatgaatatctgtgaagaagttttcaagatctaaaatagggtagcctacaatctgtccgtaaccgtgatacgtaatatctccgccacggtttacctttacgaaagtggcatcgatttctttcagcttatcaattccggcaagcatattttcttcatgcccgctttttcccagcgtataaacatgtggatgttccacgagaagaaaatgattgggggttttgctgtgctgttccgcaggaagatcgcggtttttaattttcagatctatgatgtttttcatcagagattcctgataatcccacgccgactgatattcccgcgttcctaagtcttcaaattctactactttattctgaattgtattcatatcattttttgaatacacaaatttagtgatttttaggctttaatggaatggatgaaatctatagctttggtcttccagtctctattttgaagtaaaatgttgacgaaagcagttccgatgattccgccatccgctttttcggttacattgtcgaagtcttcttttgatttgattccaaaaccgatcatcaccggattttgtaaaggaagtgaagctaatcttgaaagatattcttcgtttttgagaacagcctgatcgtttccggtggttgatgaggaacttaccgcatacaaaaatccggagcttaaagaatcgaggtataaaattctttcgtccgaagtttcgggagtcaccagaaaggtgaaattcagatggtattttgctaaaattttctgatagtttttttcaaattcaatgggaggaagatcgggaataattaatcctgaaactccgctttccgaacatgctgcacagaattcttcaaatccgaaacgcagcaccggattgatgtagcccattaaaattaaagggatttttatttcgtttttaatggatttcaattgtgagaagagtttttcgatggtcattccgtttttcagggctaattcatgagcctgctgaataacgggaccgtctgcaacgggatctgaatacggcatcccgatttcgatcatctgcgcgccggaatcctgaattaattgtatgatttcagcagtattttccggttcgggaattcctgcggtgaagtatatatttagttttttcatttaaaaattctttttaatggtgtcatttcgtaaaatctgtttaaaatagttttttagtttaactgcaaaagatcattataatgcatgattataatatattttaagctctcaaaagtttaaaaatcaaagcttttttgaaagctattgtgatcttttattgataaacactaatcatttagtttatcttttatgacttttatggttaaataaagtgtaagttcatcagttctttgtaatgacaaaaattatttttgatgttgacgatgcgatccggcttgaacggagctctttttgtgcagcaaagcggaacaaaaaagcgggagtggaagacggaaattatcgcccgaattattttacaaatgtttcagataggtttccatatctttatctccgcgaccgctgagacaaataaccacaatatcgtcttcgttaaatttctttttgtcgaaaaccgcgagcgcgtgagagctttccagagcgggaatgatgccttcgagtttggtgagctcaaatgctgattttagtgcttcatcgtcgttgatgctgaaaaattctgctctttgttccctgaacaaatttgcgtgaaaaggtccgattccgggataatccagccctgcggaaatggagtggggctcgataacctgtccgtcattggtctgcattacaaggcttttgcttccgtgcagaatgcctaaagttcccagaaaagtcgtcgcggcagattttccggattctacgccgaaacctcctgcttcagcagcgataattttcacgtctttttcgtttacaaaatggtaaaaagcgcctgctgcattgcttccgccaccaacacaggcaataatataatcaggattttctcttcctgtctgttccagaagctgttcttttatctcttttgaaatcacactctgaaatctcgccacaagatccggaaaaggatgcggaccgaccacacttccgatgacgtaatgagtggtcacggggttgttgatccagtctcttaaggcttcatttacagcgtctttcagtgttttggaacctgaagttgcaggaacgacttttgcgccgagcattttcattcttgcgacattgggagcctgtctctggatatcgacttcgcccatgtaaacaatgcattccaatcctaaaagcgcgcaggctgtagcggtggcaacgccgtgctgtccggctccggtttcggcaatgattctgttttttccgagacgttttgccaacaaaacctgtcctaaagcgttattgattttatgcgctccggtgtggttgagatcttctctttttaagtaaattttggtgttgtatttttggcttaaatttttcgcaaaatacaatggtgtagcacgtcctacgtaattttttaacaaatcctgatattcctgttgaaaatcttcagattcaataatgtcaagatagtttttttgcagttcctctacgttcgggtagagcatttccgggatgaaagcgcctccgaattctccataatatccgtgttcgtcggggtttctataattcattttgtaatgtatttatcagtgaaaggttataatcaaactgctgtttgctgatctgtttgttctgatgcagcaaatgcagttttgcagttaaatctattaaaatatctaaatctaatttcgagttgtacatggtaatcgcaatttcaagattatcaacaagataataagagtcgaatttctcatacaggcagaaaattttacagtaaacgattccgaaatcatatttcacactggcttttacgttgctgtcgagcaatttatcggcaatcaccaccaaatgatagctgtcccagaaatgaatggttttaaagaaatattcgacatcttctttgtgaaaatttttaatgatttcgatgaaatcacttaataatcctccgatgtaccaatattctgtattgctgtcattttcagagacaaaatcatgcagtctttctactttttcattttcaaatttttgagaaaacaggactctgtgaacggattttccgatttcttcaagatttaatttcttaaattttaaaagcttcagttttctcgaataatattttttcaatgttttttgtttttttattattgattatccgttattcatcataatgcttaattttaacgcaaagaatcgctaagattcttttatataccaactgtttttaagttcgcaaatgcgtttcactcagcaaagaactcaaaggttttctaattatgacaaattacggacaatcatttttattgtgttttaattgatgatcagatcagtttttctctaaatatttttatctgattgatgtttttaactccgggttctgtttcaaacctcgaattgatgtccagagcaaacggtttttgttttaaaatgcttatgttttctatattttcttctgaaattccgccacttaaaaaatagggaaggggaatttcaatgttgtttaacagattccagtcgaaggtttttcctgttcctccaaatgattttgaatcggtgtcgaaaagaatataatcgtttgttggcgcatatttattgattgttttttgaagttcctcaaagttttggtttccaattcggatcactttgatgattttgatttcagaatttaatttttttcttaattctgtaataaaatattcatcttcatcgccgtgaagctgtatgaaattcagttttgctttttctgctgtttcaactactttttctaagttttcattcacaaaaacgccgacttttccggaatgttcaattgctgaaatctgttccggattcaaatgtttcaaaacatacctgagcgatttttcataaaagataaaaccaagaaagtctgtctgtaaagatattaacttctgaatctgatcagattgggttaatccacaaacttttagcttcggtgcggttttattcgtcaatagattgttgtctggtgatttcatacctgattttttaaattcctgtattcgaaataaattcagccaacttttttccgggattttcatgtttcataaaatattcgcccatcagaaatccgtcgaaaccttcattttttaaatatctgaaatcttcttcgttgtaaattccgctttcggcaacagacagaatgtctttcggaagctgatttttcaaagtaaccgaatgttgcagatccactttgaaatctttcaagttcctgttgttaattcccacaagatcaatgtttttattaatatgtttcagctcttcttcggtatggatttccagtaaaacttccaatcccaactcgtgagaaagttctgtaaattctgaaacctgttgtggtgaaagacaggctgcaatcaataaaataacatctgcaccgatgcttttggcttcataaaactgatattcatcaatcatgaaatcttttcgcagaatcggaatatttacagaatttcttacattcagaatatcctcagaacttcctccgaaaaaatcccgatccgttaaaacagagattccgctcgctccgaattgttcatatgcggaaaccacttctaaaggtgaaactgcatcattgataattccttttgagggtgattgtcttttgaattcggcaatgattccgcttctcttttttaagctttctttcagtgaaaaattttctcttccgaaaaattcagattccttcaatgctgagactgaagtatttgatttcgagaaggaaacctcttctttttttctttgtatgattttatctaaaatattcataatcaatttcattattccaaaagaagttccagacttcttaatgcttttccttcgtgtaaactttctttcgccatcaaaaggcaatcttcatagcttccgaatttatcggtgtgataaagggcaaccgctgcatttgccaatacaacggcattctgttgttccgttccttttccctgaagaatatttctgaaaatttttgccgtttcctgaggtgtttcgcctgcttttatgctttcatgcgtgatagaatcaaaacctagatcttctgtggaatagacttcttctccttttttggtaataattttactgtcgtgggtaaggctgatctcgtcgtagccgtccatcccgtgaaccagagtaaagtgacggttatctttttgcaataaatactggtaaattcttgcgatttccagattgtaaacaccgatcatggaaaactgaggttttgcaggattcacaagcggaccgagaaggttgaaaaaagttctgagacctaaagctcttcgcagcgcaccaaccgattgcagtgccggatgaaaatagggggcatgcaaaaagcagatgttggctttttcaagatcttcctgaagtctttccgaactgtttttgaattcatagcccagttcttccagtacattggaagatcctgtgatggtagaagctccgtaatttccgtgtttcgttactttctgtcccgctcctgccactacaaaacttgctaaagttgagatattgatagtgttttttccgtcaccgcccgttcctacaatatcaatggcatctccggaatcgatgtttacgggaaccgccatttgcagaagggcttcacgaaagccttccagctctttaagcgtgatatttcgcatgaggaaaacacttataaaagccgtaacttcggttgcattgaatttattctgggcaatctcaatcataatcgcctttgcctcagatttggacaaggtatgatgattaaaaaggtattgcaggatctctttcatttgtggaggttttatggttgagggaatttgtgctgttttcaattgagtagaaagtttttgatgataatttctccctgcggagtaagaatgctttccggatgaaactgtacgccgtgaacatcatattttttatgctgtaacgccataatcattccatctttgtctactgcggtaatttccagttcttccggtaaatcttcgcggttaacaacccaactgtggtatcttccgacttcaattccgctggatagatttttaaaaattttagtgtcttcttttacaaaatctgcggaagttgccactccatgaaaaatttcggaaagattggttaaacttcctccaaaagcttctgcaattgcctgctgaccgagacatacgcctaaaatgctttttttcggagcgtattccttaatcagatccagtaaaattcctgcttcttccggaattccgggaccgggtgaaagtacgattttatcgtactgatcgatttcttccagactgatctggtcattttttaccacatccactttggtatccaaaactctctcgataatctgaaccagattgtaggtaaagctgtcgtagttatcgaatacaagaactttagctgatggcttttggttgtttgttgatggttctgtattattcatttttatttttttctgtaataattaataaatccgtttagcaattttttgcaaaggattaaaacttcttcttttagacaattttaagttggatcataaattaaatttgatagttttctggattcagtccagacatctaaattctgtcaactagactcaatcaactattcactaatttctccgctttttccactgcttttttcagggcattcagtttattgtttacttcctgaagctcactttcggggttggattttgccacaagtcctgctcctgcctgataatacagcgtattgtttttgcttaaaaaagttcggatcataattgcctgattgcagtctccgttcagaccaatcattccgatgcacccgccataatatcctctggaatctttttcatattggttaattaactgcaacgctctgtgtttcggggctccacttaaagttccctgcggaaaagttgttgccaccatttcgaaaggatttacattttcctgcagatctgctgtcacttcgcttaccatgtggataacgtgcgaaaaaagctgtatttcttttaatttggttaccgttacgttttttccgagttttccaagatcattccttgcaagatccacaagcatcgtgtgttctgcattttctttttcatcgttttttaaagtttcgatagactggagatcagtttcaaaatgtcctgttcttttgaatgttccggcaatcggatgaataacggctttgttgtttttaataattaactggctttcagggcttgaaccgaagagtttgtaattgccataatcgaagaaaaataaataaggggaaggattgatgtttcttaaagcacggtagacattgaattcatctcctttaaatttctgctgaaatcttctgcttaaaaccaattggaaaacatcgcctctcatgcagtgtttctgagctgtttttacgagttcaatatattcttcatccgtaatattagaagtttctgctccttctttttcgaaaggataaattacggaattcagattcttgattaagctttcaagaaggtaaaattcagattttacaccttccatctgattttcaataatatgcatttcatcgttgtaatgattgatggcaataacatattgatataatcggtaacgaagaatcgggatttcaacttcgggactctgtgctttgaactgaatattttcaaaaaactgaaccgcctcgaaactggtatatccgaaaagactttgtgctgtctgttctataggatctgccgttttttcgcattcgaaaagatctgagaaattctgaaaaacatcttcaattttattttcaatgataaattgttttacaggttcctgtcccggaagttttatttcaaaatcatttaaatttttaatttcaattccggcaatcgcattgatggcaatgaaagagaagttgttatcaatatttttagaatctgagctttccagaagaatagtatctctgaatttgtcgcgaatctgcagatagatattcatcggagtctgaagatctccgagtgtttttttggaaacggtttttatttttatctttttactgaacattgcagttgaattttaaaatggatgaaacaaaaaaagacttcaacgaattacgtcaaagtctttattatttgttataaattatttctgttggttgtttagcattaacaacatgacaataacatcagacccgacgaagagtttgaatgccaccaccacatatttttgttgttaaccatagtacaaatgtatataatttttttaatatgaaaacaaaaaaattatgaaattaaaaaaaacttttatggttgtccgcaatttgtcatcattaaaaaacctttgagttctttgctgagtgaaacgcctttgcgaacctaaaaacagttggcatataaaagaatcttagcgaaatctttgcgttaaaaagcaatatgattaataacggatcatcaaaaaacttaatctgaaaactgatggctttcactaatcataaaaatcttttagcagaaaaaatttaatgaaatatctttaaaaatggaggtttatcataagcttgaaagtttattttttatatttttgtctaaatttttataggaaaaataatgaaaaaagtattagcaatcgcgtttatcggtggtttattggcagctagctgctctaaaaagccaaatcatgacttacaggacagcaacacgatgttgccagagccggatgctccaactgtggtggattctactgccaaaaaaactgaagcagcaaaagtaaatgccgcagaatctcttcctgcagctgaagctaaagcagatactcttacaaaaaaataatgaaaaatctgtttttgacaggatgtctggcaatgctgatgttttcctgttccaaaaaagaaaatacacctgttgatgcggcttctcccgaagctacatcaatgaatgaaccggcgaaaagtaatctttccggcgacaaaattattgaaacgctggactgttccggatgtcatgcggtgaatgaaagaatgataggaccttcttatcaggaaatagctgataagtattctgaaaaggatgcagaaatgctggcttctaagattatagaaggcggaagcggagtttggggaggcgttccgatgtctccacatccacaggtgtcgaaagaagatgccaaaaaaatggtacagtatattttaagtctgaaaaaataattgatgactgaaaagtctgctttacacccaagaaatctgcatcgtgatccttatgatttcgaacaactgatttcctgtgtaccggaactcaaacactatgtttttgtgaacgcttatcaaagtgtaacaattaatttcagtcttccgaaggctgtaaaattgctgaacaaagcgttgttgttacacttttataaggttcaggattgggatattcccgatggtaatctctgtcctccgattcccggaagagcagattacattcattatattgccgatttaatcggtgaaaaagatcctcagaattctgatattaaaggactggatatcgggacaggagcaaatcttgtctatcctttaattgcccatcgttcttacgggtggaaaatgcttggaactgatattaacgacatttccctgaaaaacgcggaatatattttgagtcagaatccggatttattaccttttatacatctgaaaaaacagccggaaactcaacgtattttcaaaaatattattgataaagaagatcgttttgtattttcgatgtgcaatccgccttttcatgattccgaagaatctgccatgaaagggaatttcagaaagacaaaaaatcttaaaaaatctacggttaaaaaaccattactgaatttcgggggacaacagtcggaattatggtgtgaaggcggagaactggctttcattacaaatatgattcgtgaaagtactctgtattcatctcaggttttatggtttacctgtcttgtttccaaaaaagagaacctcagtaaattaacattccttttaaagaaaataaaagcagtcgatttcaggattatcgaaatgtctcagggacagaaaatcagcaggatattggcttggacttttattcctcccgacaaacatacaaaatggtgatccattttaaaaaaacgtcctacaaatatttgtaagacgtttattaattattgtgttttagaatcgtattttagaaataatctgctttcacatacaaattgtcgtttcctgtaccgtatgtagcacgaaccgactgcccactcgaacatcccgttagagcaaagacatcaagtctgtaagttcccgcaggcaaactcagcataggattggaagccgactgataatttccggtaacatttgttgtagcacctgttaaagaattgacgtgtgaaacagatgatagtcccatattatcctgaataattgttgcgcctgtagaatctgaaatcctgatccagctaattgaaatacgcggagaaccatctgtaattactcctcctgcagcattggcaaatgacgtggagaccgatgaaaatatagaaacaatggcaggtcttgctaaagtaaatgtggtattataaacagactgtgttgccgttccaatggctgaagctgtcgctgtcgcattaagcacaacgggagaagcattaggaataacattcgtattgaaaatcagcatttctgaagctttaccctgataaatatctcctgttgcggtatccagtattaaaggaaccgttgtggtaggacttcctgttgcaattgcctgtaagttgcttactctgataggagctgttgctgcattcacttcaagtcttcttgcaggagtactagttcctatcccgatatttcctgccggagcagcaagagttccggtcattcctgttccgaaaattgcattcccgatattcatctggttacttgtggttgcagactggatctgtgtattgtttccaatcgcgatattggtgctgcctgttgtaatattggttcctgcagaagctcccaagattaagttgttgcttcccgtggttaatcccgaaccggcgatgcttcccaaaacagtattgcttgctccggttgttaaagatacaccgcccgccgtatctcccagaagaacattactagatccggaactgattgcggttccggtattaacaccaatagctatatttgaacttcctccattattagaaattaaagcattgtcaccgatggcaatatttctctgtatggaagctgcagttgtactggataaagcatttccgccaatagcaatgttggtagaacctgttgtgatcccccgtcctgtatttaaaccaattccgacatttctagcgcctgttgtcactgtatttaaggaagtcgatccgaatgcggtgtttccggttccggtcacagcgataggaatggaattatttccaaaagatgtattggttgttcccaaaattccggactggatattatttcttttgaagataatatcctgattgtctgttgttcccataaaattggttccggatgctgttccggagtttcctgtaagtccccaattctgcgcatttactgctgaaggagtagtaagtctctgccaaacccctccttcaaaataataatagcctgtagctgtgatattgacagcctgtcctgtggcggatcccgttgcaacatcatttacataaataagtgtaccggaaggaacggaagtcatattcagtgctctttcacgatccagacgtggagcgagaagtccgtctatggtagttgaggttcctgttgcattttttgcaacaacgtcaaatgtagctgtaggagtagttgtatttatccctacttgtgctttagtaattgctcccattgataaaagggaggataataggataatccttttttttcataagtaaattattttatgattagtggtaaaccaaagataataaataaaactcatttataattcatcatatagtgattattaatattgaatttaaattaatcgtttaaatatagttttataagaattatttacattgaaaataaagtattattgtataaaatatttaccttaagtttaaggtgaaattttgtaaataatcactaaatttgtacgcttttagaaaaataagaaatgcaattatcagaacaagaaatcattagaagagaaaagctgaataagcttgttgaaatggggattaatgcattcccggcggatgaatacatcattacagatactacagaatctataaaacaggatttcgcagaaagtaaacaggtgaagatcgcggggagactgatgtcgcgaagaattcaggggaaagcttcttttgctgagttgcaggattctacaggaagaattcaggtgtattttaacagggatgagatctgtacaggagaagataaaactttatataatgaagtgtacaaacatcttttggatatcggagacattatcggagttgaaggtgagctgtttacaacgcaggtaggagaaaagacggttttggtgaaaaatttcaccctgttaacaaaatctctaagacctcttccacaggcaaaaacggatgaaaacggtgttgttcacgatgcatttaatgatccggaactaagatacagacagcgttatgtagatttaacggtaaatcctcaaattaaggaagttttcgtaaaaagaacaaaactgttcaatgcgatgagaacgttcttcaatgatgcaggatattttgaggtagaaactccgatcttgcaggcaattccgggaggagctgcggcaagacctttcattacgcatcacaatgctttggatattcctttatatttaagaattgccaacgagttatatcttaaaagattaatcgtaggtggttttgacggggtttatgaattctccaaaaacttcagaaatgaaggaatggacagaacccacaaccctgaatttaccgcaatggaaatttatgtagcatacaaagactacaactggatgatggatttcacagagaaattattagaattctgtgctattcaggtaaacggaacaacaaaagctactttcggagaacatgaagtggatttcaaagcgccttaccagagaatttccatgacggatgcgattcttaaatttacaggattcgatatcaccggaaaaacagaacaggaattattcgattttgcaaaatctatcggaattgatgtgaatgaaacgatggggaaaggaaaattaattgatgaaatttttggtgaaaagtgtgaagggaacttcattcagccaactttcattacagattatccgatcgaaatgtcaccgcttacgaaaaaacacagaagcaaagaaggcttaaccgagcgtttcgagctgatggtttgcggaaaagaaatcgccaatgcttattctgagcttaatgatcctattgatcagagagagcgttttgaggagcagttaaaattatcagaaaaaggagacgacgaagcaggacagtttattgatgaagatttcttacgagcgctggaatacggaatgccgccaacttcaggtttaggaatcggaatggacagattaattatgttccttacgaataatgcatctattcaggaagttttattcttccctcaaatgagacctgagaaagcggttcctcaaattgaactgggtgaagatgaaaaagtaattcttgaaatcttaaaatcaggagaacagattgctttggcagaagtgaaagagcaatctcaactttcaggaaagaaatgggacaaagcctcaaaaactttgacgaaaaataatctcgtgaaagtggagaagattgatgaggttcttttaataaaactggtttaagattttaccgtttaaaataatataaggtcgtctcaggacgatcttttttattatattcaaaaacttttttaaaaaattaaaactaatgattaaaaaaaataaagttaatcagaagattcctatatattctagccatgatgaaaactcaaaaaccgaaagttttttgcaagagggagatattgttgaatttaatcgcgaaaaaagaagggacggtattgattggattgagattattttgaacagaaaaaattacttcataaaaaaagattcttcaaagttttctttattaaaaagagtcaaacttattgataatgcttgtaccattgtattctttgaatcgaaagccggagaaaaatatacttttggtgaagtatttacggttcattcgcttgaaggtatgaatcaggggtgtattaaagtgaaaagaatttttgatcatgcgcaacaagagaaatgcattaatctgtattatgatataaacaaggttaatatttctaaaaggatttttgcaaaaggagaagaaatcataattaccaataagataggagtgtttactgaggttttatatggcaaaaagacaggatatattttgtctgatattgcttattatgaaccgaaaaattggtggatggtagctgttgtttctgtagttggtttatttatgatggttggcttaatatacggtgctatatcttcaggctgggttgttaaaggggctttcttagccattccggtaatcattgtatctgcaattattattgtttttataaaaggaattttgacaattattaatcttgttgttgaaaatattagaaaaagattgtaattttttactgtaaaaactatttctgtacaatttccgttattcataaaaactaaatgagatgagaattctgatcgtccttatttttctgttcgtcaatgtgaaagctcagatgcttagttctgtttatttcgagtacaatagttctaaactgacgaaagaatcgcagagaaaacttgacagtctggcgcaacttagatataatctgaaattcagaatttttggaaattgtgatatttccggaacttcggaatacaataaaaagctgtctgaaaatcgtgctaatgcggttaatcaatatttacaatcaaaaatcggaaacaatatcaaactggaaagtgtggtaggattgggaaaagaaaaacccatcaatgacaacagtaccgaagaactgcgcggtaaaaacagaagggtagatgtatttattgatcgggtgatgattgccggagaaatacattccggaaaggtctttgagagttttttcagcaaaaaagtttcggaaatgaaaatcggagaaactttttctttgccgaatgttaattttatcggaggtcgccacgtatggctgccaaaaggaaatagtgtattgatgcagttagcggaaattttaaaaaataatccgacaatcgaagtagaattgcagggacatatctgctgtgattatgacaatttcgatggtgaagatttagatttgaaaacatttaacctatcttggacgagagccaatgccatcaaagaatttctggaaaaacaaggaattgcttccacgcgcatcaaagcaaccggaatgggacatctcaatcctgttgtttatcccgaaagaaaggaagaggatttcatgaagaacaggagggtggaaattgttttgcttaaaaaatagattacaaggtttcggcgcagcaaagctgcgccgaaactattataccttataaaattatcttctcagtttactaaatgaagccatcagataaaacaaaaacggaaggatgaaaacagagccgagcattaacgcccatcccaaagccgaaattgtttttggtgcggcaacattgtctaataaggaaagatgctctccgtttgcaaacaaaataatattcggattgtgttgataagtagcggcaaccagaatcataatcacctgaaatcctgctaaagctcttacaggtaaaagtttacggcgattcattgctctcagaatcaaaaatagacagatggtagcaaaaaccgttgccataattcccaaaggttttgagaaaacccacatcagtaaaggaatatcggaaaaataagctgtgataaaaaccagaagccctgcgataacaacaaagaccatggtctgtttggattttctgatcatcatacccagttcaaaacggtcggaagtctctctcaaagcaaaaacggaagccagataagcacagatagaaacggtaaataaacctactgcaacaccaaaccagttcagccaactgaaaatatacaaatctaaaaagttggtcgcctccggattaatagaatgggagatcgttgctgctgccgttaatcccagaaaaaaaggagtcagtaaactcgcaaagtaaaaaatctgtgtgtaaatgcgttgccaactgtcttccaccgcatcataatgccggaacgtaaaagctgtcccgcgtgcaataattcccaccagcattaaaaccaaaggaatatgaaggtacgtggaaagtgtggtgtaaacctccggaaaaccgacaaaaagaataacaatcgcaataatcagccacatatgattggcttcccaaaccggagcaatggaagtatacatcaaagtctgcgttttgggtctgttcttttttctggtgaactgttcaacaattcccgctccgaaatcggctccgcctaaaataacatacagacagatcgatagccagagaaatcctataacaacgtaaatcatgacttcttatttttagagttaaactgtggatcggtaggatcgtataatttgggaaccattttaatctgtcttgttaaaaggaaaaaaataaccaaagagagtgatgcgaaaattgcagtaaaaaagtaaaaagaatactgaattccgggcattggcgtcacggcgtcggctgttttcataattccgtagataatccagggctgtcttccgacttcagttactgtccatcccgcttccagagcaatatatccgaaaggagttgcatataaaaatgttttcagaagccagtttttggaaagccattctttcctgaaaaatgttgcatacagaaaaacgcttccaataataatcatcacaacaccaaagaaaatcatgatctgaaaagcgtaatgtacaaccgcaaccggaggccattcctcttttgggaaatctttcagtccttttacttctgcgttaaaatcattagccactaaaaaactcagaactttcggaatttttacggcatattttatctcttcttttttctcgtccggaattccgccaatcacaaatgaggctcctttttccgtttcaaaatgcgcttccatggctgctaattttatcggctgtctttctgcaacggattttgccgcaacatcaccacttaaaggtgctccgaatgctccgatcatcgcaaatcctgctgcaattctgaaggctttggtatgaaattcaacattttttttctttagaattaaaaaagcatgaactccggcaacggcaaatccggttgcacaaaacgcagcaaccgtcatgtgtaaagcctgaggaaaccacgcgtcattgaacatggctttaataggatctatatttaaatattgtccgttcacataatcgaatcctgccggagaattcatccacgcgtttgcggcaaccactaaaattcccgaagctaaaccgcttaatcctaccaaaaatccgcagaaccaatgaaaccatttattaaatctgtcccatccgtaaagaaaaaatccgatagcgatggcttcaataaagaaagcggttccttccagtgaaaaaggcattccgaagatgggtcctgcgtgtttcataaattcaggccacagaagtcccagctcaaaagaaagcatcgttccggaaacagctccggtcgcaaaaaggattgctacacccttgctccatgcttttgtgagacctttataaacttcgttttttgtttttaagtatttccagtgtgcaaaagccataagaaaaggcataaccatacccacacaggaaaaaataatgtggaagccgagtgacattgccatctgtgcacgagctgcaagaaagtcgtccataaaccattcattttgagtaaataaatttacggataaattatagatcgtcattatgatttacaacagcatttgtttgagaaataggttttaactttgatattttttaagagaaaataatctttgctttttgtggaaaaatcaatacttttttgacactttttaactttcgtacctcgaaaaaaatcacgatatttgtaagtctttgcatttagcaggattttttaatatttatatgagtcagaaacaatatacagctagtagtattcaggcattggaaggaatggaacacgtgcgtatgcgtccttcaatgtacattggtgatgtgggagtaagaggtctccatcatttggtttatgaagtagtagataactctatcgacgaagctttagcagggtactgcgatacgatctttgtcagcattaaagaaggaaacgggatcgaggttagcgataacggtagaggtattcctgtggatttccacgaaaaagaacaaaaatccgctcttgaggtggtaatgacgaaaatcggggcaggaggtaagtttgataaagattcttataaagtttccggaggtcttcacggagttggggtttcgtgtgtaaacgcactttccaacgaaatggtaaccacagtttacagagacggaaacgtttatcagcagatatattcaagaggtaaagctcagaccggagtagaggaaataggacacagcgatcagagaggaacaaaacagttcttccagccggatgattctatctttacagaactggtatataattatgatacattagcaagccgtttaagagagctttcttatttaaataaaggaattaccatcacccttacagacgaaagagaaaaactggaagacggttctttcagatcggaagttttccattctgaaggtggtctaaaggagttcgttgctttcatcgacggaaaccgtgagtcgatcatggaaaatgtaattttcatggaaggcgaaagagacgatattcctgtagaagtggcaatgcgttacaatacgtcatttaatgagaatcttcactcgtacgttaataatatcaatactcacgaaggaggaactcacttagcaggtttcagacgtgctttaacgagaaccttaaagaaatatgcggatgatttaggaattcctcagaaagaaaaagtagaaattacaggagacgatttccgtgaaggacttacagctgtagtttctgtaaaagtaatggaacctcagtttgaaggacagaccaaaacaaaattaggaaactctgaagtttcgggggctgttgataaaattgttggggaaatgctgactaactttttagaagaaaatcccaacgaagcaaaaattatcgttcagaaggttgttttagctgcaaaagcaagacaggctgcgaaaaaagcccgtgaaatggttcagagaaaatctccgatgggaggttccggacttccgggaaaactatccgactgttcttcaaaagatccggcagaatcagaaattttcttggttgagggagattccgcgggtggaactgcaaaacagggacgtgacagattctttcaggcaattcttccgttaagaggtaaaattctgaatgttgagaaatcaatgcttcataaagtatatgataatgaagagattaaaaatatttataccgctttaggagtttccgtaggtacggaagaagacagcaaagcgctgaatatggcaaaattaagatatcataaaatcgtaatcatgaccgatgccgatattgatggttctcacatttcaacgttgatcttaaccttcttcttcagatacatgaaagaattgattgagaacggctatatttatattgctcagccgcctttgtacctattgaaaaaaggaaataaaaaagtatatgcttataacgaaaaagagcgtgaagaatttactttggaaatgtctccggatggaaaaggtgttgaagttcagcgttataaaggtcttggagagatgaatcctgaacagctttgggaaaccactctgaatcctgaacacagaatcctgaaacaggtaaccatcgacaatgcagtggaagcagacagtgtattttctatgttgatgggagacgaggttccgccaagaagagaatttattgaaaagaatgccaaatatgcaaaaattgatgcataattgaatttaaaaaatacgattataaaagacttcagcaatggagtctttttttatttccattataaagtcttcaatacaataaaaaataattttgtcagttataagatttcattatttttgctaaattttaataaccatggtgaaaatactttgtattggagcactttcgatggcttctttttactactcacaaaactttccggtttctgccattcctgagaatctgaagaaaaacgcagatgcggtgatcaggaaagatcttacgacgattcaggttaataaaattgatgatatcagatatcagtattatacggtgaccactgttttgaataaacacggcgattccgatgcgcagatttatattccttatgaaaaaggcaatagtatttcggacatcagggtaaatatttacgatgaatccggaaagaaaataaagtcattttccaaatcagattttggggattttgccaataataatcagggaactttctattcggataaccgagtgatggctttgtcttatacgcctacgcaatatccttacaccgtggaattttcctatcagatcgcagatgaaaacacagttttcctgccggattttattcctttcagatcaaccaatatttcactggaagaagcgcagatgaagatcatcaacaaatcaggcatcgagcttaaaacaaaaacatatccttcggcttataactatacttcagttacagaaagcgataatgcaggagaaaaaatatattcttataaaaatgttccggctattgatgatgcttttttgcttccccaaccgataaaaattttgccaaaagtaagttttgcattaacgaaattcaatcttgaaggaaaacacgggagtataaacaactggggtgagttcggatcttggtattacaacagtattttacagccggtttctttatcaacgcctgcaattaaagcggaagttgcagcattaaatttacagggaacaaccgaagaaaaggtaaaaaaactatatcagtatatgcagagcaagacaaggtatatttttgtagccttgggaatcggcggttggcagccgatgcttccggatgaggttcagaaaaaaggatatggtgactgcaaaggattaacgaattatatgaaaactttactggatgaagctggaattccgtcttattattcggtgatcaattcgggttcttctccggtttcgtttgataaagattttcctaaaatgggaggaaaccatgttattctgatggttcctgcagagaaaggaaatatctggcttgaaaatacatctcagcaaatagcttttaatcatctaagttacggaaccacagaaagaaatgtactttccatcagaaaaaacggaattgaattgattgatactccggtttatgcggcagaccaaagcaaagaaaaacagcttttaaaaataaagcttaatgaagacaacagtatttccggggaaggtaattttgcgtacacgggaattcagtatgataataatctcgttctggcaacaatgtcaccaaaagaaagaaacgaagccataaaaaatcttctggatgttcttcattttgaaaagattgaaatgaaaaatttcctgaacgataaagacaatgccgttgcaaaatttgatcttgattttaaagccaataattattctaaaaacgcaggaagcagcatcattttcaaagcagtacctatttattcagacaatgtttacaaaacagacgaaaacagggaattgccttttgaattaagacagtcttttcaggatgaatacgaaatcaactttgcccttccaaaaaattataaaatagaagaacttcctgagaatgtgaccttaaattcagaattcggaagctacaaattaagctttgtaaaaaatggcgaagaactgaaagtcagccgaaccataagaatcaataaaggactttatcctaaagaaaaatataacgattacgttagtttccgaaaaaaaaccattaacatcgacaactcaaaaattttaatttctaaaatttaacatgaaaaaaatatttctagtggctttctgttcaatgaatttgatatttattgaagctcagaagcatgaatttcttaactatcctaaatttaatgatgcagatctttcaaagcagaaatctgcgctggatgaaaatgcacctgctgaaattttatttaaatcgttgcatttcagcattgataacaataccggaaatcttgtgaaaaaagctttttacagggtgaaaatttatgataaagacaaggcggaagactggttgaaccttgaaattccgttataccaaagcggaagcgatcaggagaccatttcgaaggtaaaagctttcacgtacaatctggaaaacggaacttccgtatctacaaaagttgataaaagctctaaatacaaaagtaaggaaagcaaatatgtctccattacaaaatttgcttttccaaatgtgaaaaatggctctgttatcgaataccagtatgaagtgacttctccgtttctctatgtggttccggaaattatgatcgaaacagatacaccgtcgttatacacggaatatgttttagacagcccttcaaatattgcttataacgtaaattatacaggttttcttactcccaaatacagagaagtggaagaaagattgatgtacggaatgaattacagaacctaccgctttggatatgaaaatgtgaaaggctttaaaacagaaaaatttgtaaacaacgaccgtaattacagaacaaaaataagtgcagaacttcactcaacaaacttcagagagcttaaattgtattcttcgtcgtgggaaaagatcaaagacagattgtatgaaaatgaagatttcggaggagaattaaagaagacaagactggcaaaagacaatatgcctgcaaatatttcaggtatttcaggagagatagaaaaagccaatgcagtttttaactatgtaaaaaatacctttacatggaacaaagacagaggaatttacacagaagacggtatcaaaaaaatgctggaaacaaagaccggaaatgcggcagaaatcaatctgtttttggtcatgatgcttcgtgaggccggaataaaagcagatccgcttacgatttctacggtgagcaacggttttattaacatcgcttcacccaatgtttccaatatgaattttgtaattgctgccattcagacaaaagatggctttcatttgtatgatgcgacttcaaagcagtcttcaatcgatcagttaccgccaagagactggaaccagttcggaattttgatgaataaagacaaagttcagcaattatcgatgatcaatgcaaaaacaagttttacctatcttacggcggaggcaaaaattaatgcagacggaagcatttcgggaacctattccgataaagacacaggaacgtatgctatttttgcaaaagagagctatgacgataatacagaaaaatacaaaaagcagtataaagataattttgcgatagactttaccaatatcgattcaaaagtacatgaaaatggtgattttgaaagcaccatgaagttttcttccgagaatttaatcgacaggatcggaaaaaaaatgattatcaatcctatgttgtttttaaataaaaactcaaatgaattcgatcagacagaagaaagaaaataccttatcgattttacttcgccgttcaccagaatcaagaaaatagttttggaaattccagaaggatataccattgaagaaatgccgaaaaacaaaaaaatcgtaaccgacgataaagaaatcgaatacagttatattgctgaacaaaaaggaaacaagatcgaagtaatttccactactaaagttaagagtccgaattatgagaaagaatattatccggcttttaaacagatttggggagtggcttccaaacaggaaaaccaggtcatcagtcttgtaaaaaaacagtaattaaattttttttcaaaaataatctcaaaccattcattttttgaatggtttttgcattgaagaaggaaaatcagaattatgaaaaataccattgctgtcttggcactttcttttttctttgttttttctgcctgtaaaaagacggaaagcaataatataaatgaaacagaagctgcagctcccgaaaagtttacagtagattccgtgaaaatcagcgattccacgaaattaagcgattctttaaccgttaaatatacttccaaaatgttgctgttcccgacagttaaggataaaaaattattagacagcatttattttacagaaaaaaatattggcgatttttccagagaaggattgctgaattaccttcagaaaagcaaaaacgaatattttaataacatcagaaaagattcaaaagattggatttcagatatttcattttctcaggaatggtattcggatacgggaatgaaagtaaaatccaatatcaacgattatctccagatcgaatacttttgggcttcatatgaaggaggagcgcacgataattatggttattccgaaagagtttttgatcttcaaaacaataaaaagcttgaattaaaagacattacttccatgccgaaagaaaaactggaagcccttttaatgaaaaatatcaacaagactaacagcggaacaacagatgataaaggagaagttaataattctgaaatgcttttggtagacaaaattccggcgacggaaaatttttatttcgatgacaaaaatctgtatttccattacagtccgtacgaaattacagcttttgcagcaggagatattataatccctgtttcctggacagagcttaaaggaactcttactccagaatttatgaaaagaatgaaaattaaataacaatcatgcttccacatcggaagcattttttatttttgcactaatggaaaaagtcgctttcatcatcaatcctttttcggcgaaaaaaaattatcagccgtttcttaacgaactgaaagcaaaggtgaaagatcctttgtattacatctcggaatccattcccggaaccgatcagtttattcaggatcattttaatgccgtggatatttttgtagccatcggaggcgacggaaccatttctaccgtagccagaaatctcatcaacacagaaaaaattctggcgatttttccggcaggttccggaaacggattttccaacgaaacccagttcagcaaaaatctggacgaactgttggaaaagatcaaaaccaaaaattccagaaagattgatacgttcactgtaaatgaaagactttccatcaatgtttccggaaccggattcgacggtaaagtcgtaaaggaatttgaaaaaacaacgcggggatttaaaaactacatcaaagtttcctttaaaacttttttcagctacaagccaatcaaacttaagttttttgacgaaaaatacaagcagtacaacgggaaatatttaatggtaaacatcgccaacacaagacagtttggaaacaacgcttatattgcacctcatgcaagtaaaagtgacggtttggtagatatggttctcgttaaaaaattccctttcttctattccatgctttttgcgttcagaatgtttaccaaaaaactgaaacaggacgattacgttacctatttgcctgtttccgaaatagaatttaaggtgaataccaaaaactggcatctcgacggagaattcaacaaaataaaatctccggttcatgtaaaagttcagccatcaagcttaaggattttaatctaaaaaccgtcattccggtaaaaaaggaattgttatctatttaattttaggagctgtttcgcgctttcgctactcgctttttttggattcggcggctgcgaagcagccgccgaatccaaaaaagagctcagacatgtcgctcaatcgcggctagaatggcagtcattgtaaaactaaatctgtttcagattaaacaatgtcagcctaaacctccagttttttttccacttcattcggatgatccagacaatattgaagctgatctttatccagttgtttttcccaattggcaaccactaccgttgcgacagaatttccgattacgttggttaaagcacggcattcactcataaacttatcgattcccaaaatcagcgtcattccggcaatcggaatttcaggaaccaccgctaatgttgctgctaaagtcacaaatcccgctcccgtaactccggctgcacctttagaactcagcatggcaaccaaaagaagaatgatctgtttttcaattggaagatggatgttcagagcctgggcaataaaaagtgaagccagcgtcatataaatattggttccgtcgagattgaaagaatatccagtcggaaccaccaaaccgacaatcgctcttgagcatcctgccttttcaagcttttccattattccgggaagtgcagattctgaagaactcgttcctaagaccagcaaaagttcttctttcagataatacatcagtttaaaaatattaaacccgttgtaccaggcgacagcgcctaaaaccaaaactacaaacaatgcagaagttatataaaacgttcccaccaaaaaaatcagattcaaaaccgaatgaagtccgtattttccaatggtaaaagccatcgctccaaaagctccgatcggcgccagtttcatcagcatatgcacaattttgaagacaggagtggaaagatcctgtaaaaagtccgttactttccggctcttttctttcgttaaaaccaaagctactcccattaaaatagcaacaagaagcacctgcagaatattatctccaaccagcggactgaacagcgtttcaggaataatattcatgatgaaacctgttaacgttgtctcatgcgctttttgctgatattgtgaaacatcgcccgaaagggtagaagggtcaatattaagaccatgacccggctgtaagatatttcctaccaccaaaccgataatcaatgccaacgttgaaaaagtcaggaaatagatcatggctttaaccgcaattctgcctactttcttcaggtcagtcatgtgtgcgattcccaaggtaagagtaatgaaaatcaccggagcaataatcattttcacgagtttgatgaatccgtcgcccaaaggtttcattttttcaccaagttccggataaaatcttcctaaaagaattcccgcaacaatcgcaataataacctgaaaataaagctgttggtaaattttttttgctttcaaaagaatattgattttaaaagccgaaaattagtgaaatttactttaaataatgacaaatgtcatgaatagtttcggctcgggcgaagcccgagccgaaaccaaattactttaaatctttatataattttaatgaagcaagaatctcaaaaaacggtctcaaaatccagattattttttactcttgacattctgacgaaggaagaatctcaaataatcagtcaattaagatgttttaattcagcttttttagcttaactacaaaaacttcacctattccactgcaacagaatcatcaccgcgaccgtctgcaaccgcatgaatatttccgttgtcatcaatcaggatcatttctgttcttccgatctggttccatttttcagacttatatcctaatttttccagatctttaatcgtggtttcaggaaaattcttttcaaaagcaaccatttcaggaagccactgatggtgaaatttcggagcattgacagaaatatttgcattctgcttaaaatcgatcacatcaacaatagcctgataaacagaagtcggaatcgtcgttcctcccggagttccgactaccatgtaaggttttccgtttttcagaacaatcgttggagtcatcgaagaaagcattcttttattcggctgaatggaatttgcctctccgccaaccgctccaaacatattcggaacacccggttttatggaaaaatcgtccatttcattatttaagaaaaatcccgcaccggaaacaacaactttacttccgtaataaccattcaaagtagtggttactgctgctgcatttccatccttgtcaatcactgaaatatgggtcgtttctgtagattctttaggttgttttgttatttttcctacttctgcactcggtgttgctttgctgaaactgaagcttttccatcggttcttcagatattcgtcagaaatcagataagaagttttatcctgaataaaatcgggatcgcccatatattccgctctgtctgcataggctcttctttcggcttccaccatcacctgaacagcctgtgtagagttttgctgatatttttccagattttcgtaagctgccattttcagcatttgcgcaagaagaagtccgccgctcgaaggcaaaggcatagaaaccacctgatttcctttgtaatcaaattcaagtgcttttctttcggcaactttataatttttaagatcttccgaagtaataattccgtttcctcttttcatttcagaaaccagaagttcagctgtttttccttcataaaagccttttaaaccttgtttctgaatcaactttaacgtttcagccaaatccttctgaactaaaagatctccggctttccagggaatatctttaacaaaaacaatggaagactgattgtgcttctggaaattctgtttattgttattcagtaagttagcttcctgttcggtaatcgcaaagcctttttcagcaagatctatggcgggctgaattaatttgtccatcggaagtttacagtattttaaagtagcaaaaaaaccagccacactccccggaattccaacagctaatcttccgttttgggaaagatcggtattggctttaccgtttttatcaacatacatatcatgacttgcctttttaggtgccgtttcacgataatcgattgtgaatttttcgccattgttttttacgccaactaaaaatccgcctccgccgatgtttcctgcctgaggataaacaacggcaagtgcatattgtgtggcaacaatagcatcataagcatttcccccaattttcatcacttttgctcctgcttcgctcgccaacggatgcgcagaaacaaccactcctttatttttaactttcacctccttcacaatagtaatatctgtgtattgtgctgaaattgtggtagaaaataaaataagtgaaacaataatctttttcatttacaaaatttatattcgaatttacgattttgttttaagatagggtctaaaatatttacttttgctttcgatcaataaataaaagttaaaaatgaaatcccacacggaaagaatacttattacaggtgctttaggacaaatcggcaccgagcttacgaacagacttgttgaaattcacggagcagaaaatgttgtggcttcgggactcgacagatggcaaaagggaattaccgcggcaggtcattacgaaagaatggatgttaccaatacccaattggtaagacaggtgattaaagactacgatattactaccgtttatcatttggcttcattattgtcgggtacttcagaaaagcagcccattttcgcatggaaattaaatctggagcccctgcttcatttttgcgaaatggcaaaagaaggacttatccaaaagattttctggccgagttccattgcggtttttggaaaaggaattcctaaagaaaatgtggagcagcatgtggttttaaatccaaccacggtttacggaatttctaaaatggcgggtgagaaatggtgcgagtactattttgataagcatggagtagatgtaagaagcatccgttatccgggattgatttcatggaaaactcctgcaggtggtggaactacagattatgctgttgagattttttatgaagccattgaagaaggaaaatacacaagttttatttccgaaaacacaggaatgccgatgttgtatatggatgatgccatcaacgcaaccctgaaattaatggaagctccgaaagaaaatcttaccgtaagatcttcttataatttaggcggaatgtctttcacgccaaaagaactggctgaagaaattaagaaagaaattccggaattcgagatcgattataaaccggatttcagacaggcgattgcagattcatggccagcttcaattgatgactccgtagcgaaaaaagactggggattaagttatgatttcgggatttctgagatgactaaagacatgattaaaaatttgaaaatcaaattagctaaaaattaaattacttcgagttttaatttaaataagaattattttaacatctgatttttaatttattataaaaattatctaaaatttaatttaaatgatattgtttacttttaacatcctgaatattgaagctgactgtaaaaaagagcagtttatttctgatgaggagaggctgaaaatttcagaggataatacgaaagcaattcttagaattttagatattcatgatgttaaagcaagtttttttgtagagatttcgctcgctcagaaacttcagaatttaataaaagcaatttcattccaagggcatgaaattgctttttataataaaaattctacccttccggaaattgaaaatgctaaaaaatttactcaggaatttttagaaaaacagattcgcggaattcgtcagaaagacaataaacttccacagcaggatttaaaattgctggaatttaattacgtttccaatatagataatgccaacattctttttcctttcaaacgtctgaaaagagatacccagattaacgatgaggacggattgagtattgttccggaaagtatttctccttacagccagttgccgtataacgattttgtatttcagatgcttccgatggaatattaccagagtatggtttttgaaaccctgaaaaaggatgatttcgttctgatctatcttaattcatggcagtttacagatttccagaaatatccgtttgatattcccttttacagaaggttgaattcgggcaaaaaaatggaggacaaattagatgccctcctgagttggatcaacgagaaagaaatggctacttcccgtatgaaagattatattttttaggttgcaggaattaggttatacagcttagctaaaaactttaaaccaacaactctgaactttaaattttttaagccagctcaaaaagcgtaatttccggtaaaacgccgactcttccgggatatcccaaaactccgaaacctctgtttacatacagcatttttccttcgctttcgtataaatctgcccattttgggtatttgtactgaacaggagaccattttacatttttaagatccaaaccaaactgcattccgtgggtatgtcctgaaagcgttaaatgaacatttgcagggtgttttttcaccacataatcaaaatgggtaggatcgtggctcattaagattttaacggcagattccggaacaccttttaaggcatcatccaatcttccaaattgcggaaaaggtttcagtccccagttttcaactcctaaaatgtatattttttctccgtttttttcaatgattctgtgttcgtttcgaagcatatcaaaaccggcctgtctttcgtaatcaattaaggtatcaagatttttctttttggcttccggagaatcccagctcacataatctgcgtaatcgtggtttccgagaacggcaaattttccgtctttcgctttaatttttgaaaacaggggaatgaagggtttgaattcttcggctacattattcaccatgtctcccgtaaaaagaaccagatcgggattctgttcgttgattaagtcaatcgcatgctgaagctttcccggatccgcaaaacttccactgtgaacgtctgaaatctgtacgattttatatcctttaaagcttttgggaagattcgcaaaattcattcttacccttcttactttatggcggtattttccaaaggtaattccatcgataaaaagagctgaaagaacacctcctaaacctaatcccatgatgcttaaaaactttcttctttcagggaaaaagttctccgatggtcgggtaagtccgataagataacttccggttctgaaaatatcatcgattaataaaaacaaaacaatgaaaattttaggcaggataaaaacgagaaacagggagatcatgatctgcgcacgcatcatgcttcggtcggctctgctgaagtgggaaacttcgtaagcgaaaaaaccataaaccgctaaagaaataatacagtagcctattttgatccagttgttatctgttaaagttctgattgcctggtaaatgtaaatttccagaaaaataaaaactgccgcaatgataaaaaagtttctttgcataactaagtgtaaaaaaagcacaaagaattaatttccctgtgcttttttatgttttaaattaaatattgttaaggaaatctgtaaacgatcgcattgatgttcattccggctcctaccgaagtcatgacaatgttacctttttctttaaacgattgaccctccatttttcctttaattattaaatcaaacatggtaggaattgtggctacggaagagtttccgaaatcctgaatcgtcattggagagatagaatggtcgtaatctttcacattataaagcttgtgaagcctttcgatcatcgcataatccatttttgcattcgcctgatggattaatattttgttgatatcttcgatggaaagacctgcatcttcaatagtttctttaatcgcagcaggaacgtttttcaacgcatattcgtagatttttcttccctgcattcttacaaacagacgagtctggtcagaatctttgttgatggacggtccgttggcaagataatccagttccaaaccgttatcacaaatggtgttatgagcgatgattcctacattttcctgatctgtagcctgtactacaacagctccggctccgtctgcaaagatcattctgtttctgtcgtgcggatctgttactctgcttaatgtttcagctccgattaccaaaatggttttagcaactttagctttaattaaattatttgctaaaatcattgcttccacccaacccggacatccgaaaagcatatcgtaagtaacacattttctgtttttaatgcccagtttgttctttactctcgctgccattgtcggcatgaaatctgcgtatccgtttacggtaacttctccaaaattactcgcgtaaatgatataatccagttcctcctgatctatttttgcatctgcaatagcaatttttgcagcttcgtaaccgatttttgagttggaaagatcatcttctatgaatcttctgttttctatctctgtaatttctacaaattttgagatcgtttcctcagcaggcttgtcaatcttcaccccgtcttctgaataaaactctgaatctagaaaaaagtctcttcctataattctgctgggaagataagatccagaaccaataatgatcgtattcggcattcgtttatatgattttttttaaagatgcaaagttaataattaatattaataacagagaattaaaaatattactaaatttgcaaaaattgtactttacaatcttatgaaaaacaatccttctttaaaaggcttacttattgcagttgtggcgtttatcgtagcttttgggatttatttcctttttttagccaaaaaaaattactacgtagtagacaatcctacgccagacacattttattacaaaatcaataacggttcggaaggtgtaatcgccggaggacagacggtttctgtagaccttaatcaggggaaaaattctataaaagttttcgacagaaataaaaaattgttgtttgattcagcttttgaagtaaagaaaataagaggtcttattaatattgctcatcaggattattatattaacgatcagtattatggatataatcttaaaaaagattcattacttttggcattggataaaacgatcatcgacggaaaaccttactttggaggcgcaagacgtttcagtaagctgtttaccgatgatttttattacaatgtagacgaagattacgataaaattatcaaaaatatccagaaggtagaatcgagatcgaagatcttcagaaagcaggattaccttaattattataacgaatattacaagttttaagttttgacaaaagatattaccaaaattacgccttataataccgacgctactaaaaagagtcaggtagaagatatgttcgacaatattgcaccgaagtatgatcttctgaatcgtgttttatcgatgaaaattgatgtcatgtggagaaatacgctggtgaaatggatgaaaaaagacaatccgcaggaagtgctggatgtggctacaggaacgggagatcttgctattgcagtggaaaaaggaactggctctaaagtaattggtttagatttatcgcaacaaatgttaaatgttggcgttattaaaataaaaaaacttaaattagacggcaaaatttccatgcaaaaaggagatgcggagaagttactctatgaagataacagattcgatgcggtttccgttgcattcggagtaaggaattttgaaaaccttaccaaaggtttggcagaattaagaagagtagttaaagataacaagagtgtttatatactggagttttcaaaggttgaagggtttatggggccattgtatatgttttactttaaaaacattttacctgcaattggcagactggtttccaaagataacagggcgtatacataccttccggattctgtaaatgcttttccttatggggaaaagatgagacaaattcttttagatacaggatttaaaaaagttgaatataaaaaactaagtttaggtatagccacaatttataaagcaacaaagtaacctatgaataaatttttattaagagcactggttttagcctcagtaaatgttgcagttttagcaaacgcgcaattcagaacccgaaacagaatggataagttggaagactttgacgaacagaaattcagttggggtttttatttaagtggtaacagactagactaccgtattgttctcaatccaagatatgggatgtataacaatcagaatcttgttacatctaaagaaagctacagtttcggtgcaggtttaattgcaaaatggaggctgaatgacttcctggatgtaagattggaaccggggttacaatttgggcagagacagcttacttttaatacgcagaccaacgaccagtatgctgcaggtactttgacgaacgatccttttatcccgatgaaattaacggataaagacagaataagagatattaaaaccactttaatagacattcctgtattattggagttccacggaaacagatggtacaactccagaccttacgttgcaaccggggtaaactatattgtaaatcttcagtccaatgcaacttctacagacgacaatatgcagcaggttttcagatctactacacataactttgcatggtctgcagaaatgggaattcagttttatttcaataaatttaaactgactcctgccgtaagaggtactttcatcatgaacaacgagattgtagcagataacgcaacaacgcctccttactggacttctgcaatgtctacgttacagacaagagcaatcttctttgtattgaaattcgaataaaaatttactataaaatagataaaggagatgcattttgtgtctccttttttgtttcagggcaaaatatagaccgttttatttttgttagtattaatattttgttatttttgctaatagttagaatatacaaaacctgaaatgcttcaagatttagaaaacaatttttcagaattagaaaaaaagattttgcagttacagaaaaattacaaaaatcttagtgaaagattctcggaattaaatgttgagcatgacgaactgaagaagaaatatgatgaagaaagaagaaaaaatcaggtattagcagaagaacaaaaaaatataaaactttattcagcaatatcaggaaatcctgaacataaccgacttatgaaaaaccatatcaacaggttggtaaaagaaatagatttctgcattgcgcagcttcaaaacagtggattataatggaagtaagaagaataaccattaatatagccggaagagtatatccgctgaatgtaccggcagcagaggaagagaccctgcgtaaagtcgggaagcagatagagaatatgattaaagattttgaacagaatttcgatgtgagagacaaacaggatgctttagccatgtgtgccctgaaattgggaaccaatgccgaagtagtgtctgcgaactacgataaaacaatacaatctaccaacgaaagattagtgaaaattaatcagtcgttgaataatgaaacagggaaatagattttttttcccgaaaaagctgcctacaataattctaacacattaaaggtaaactcaacgctaaacaattaccgaacaaatgtccattgaatggcgtgccggttctccggattacagacaatggaaatcagttcaaatcgtgttgattaggagtttactctcaatctctggattattgtgggctttttttatgtaaaataattaaaagaatatgaatacaattaaaactcaatataaattatgatagaagttataatcggcgttgtttgtttattaatcggtgcggttgcagggatatttttctccaaaagctcattgaataccaaagcaaaatttattatagatgatgcacagaaaaatgccgaaaaccttatagaaaaagccaacgtacaggctgaatccataaagaaagaaaagaaccttcaggctaaagaaaaatttcttgaactgaaatctcagcacgatgcagacattcaggcaagagaaaagaaaatgcaggaagtagaaaaaagaatcaaggataaggagcacaagctgaatgatgagcttagcaaaaccggaaaacttgagaaagatctggataagcagattgctgattacgctaaaaaaacagaaatcttagaaagaaaacagcaggaattggatgttgcaaccgctaaaaaagttgaaattttagaaaaaattgccaactacaccgctgaagaagcaaaagcagaattggtagaaaccatgaaggcggaagcgaaaacaagagctcaggcgcacgttcagagcatcatggaagaagcgcagcttaatgcaaaaagcgaagcgagaaaaatcgttatccagaccattcagagaatcggaacagaacaggcaatcgaaaattcagtttctgtattcaacatcgaatcggatgaggtaaaaggaagaatcatcggtagagaaggtagaaatatccgcgctctggaagccgttacaggagtggaaattattgttgacgatactccggaagcaattcttctttcatgctttgatccggtaagaagagaaatcgcaagattatcccttcacagattggtaacagacggaagaattcacccggcaagaatcgaagaagttgtagaaaaaacaagaaagcagatcgaagaagagatcattgaagtaggaaaaagaacaatcatcgatttaggaatccacggattacaccctgaattaattaaaatcgtaggtaggatgaagtaccgttcttcttacggacaaaacctattacagcactcaagagaagtggcaaatatcgcggcgacaatggcggctgaattaggcttaaatgtaaaattagcgaaaagagcaggtctgttacatgatatcggtaaagttccggagcaggaatctgaacttcctcacgctttattaggtatgcagtgggctgaaaaatacggtgaaaatgcagaagttgtaaatgccatcggagcgcaccacgacgaagtggaaatgacttcactattgtctccgatcattcaggttgccgatgcaatttcaggagcaagaccgggagcaagaagacaggttcttgaatcttacatccaaagactgaaagaccttgaatctgcagcattaagtttcgacggagtttcttcggcttatgcaattcaggcagggagagagttaagagtaatggtggaaagcggaaaagtaaatgatgaagtagcttctcagttatcgtacgacatctcagaaaaaattcagaacgaacttacttatccgggacaggtaaaagtaacagtaatcagagaaacgagagctgtgaatattgcgagataagaatcagaaaaagataattcatgaaaacctttcaagaaattggaaggttttttatttttagcaaaatttaaaactccaaaatgcaagaactttccacgtcttcaaaactgaagtacattttttccattcctgttatcatttctgcgttaggctactttgtagatatctacgacttacttttattcgggatcgtaagaattccaagtttaaaagctttagggctgaatcctgatgtcgacggaacgtttattcttaatgcacagatgattggtttactgctgggcggaattttctggggaattttcggagacaaaaaaggaaggctttctgtgctattcggttctattttagtctattctttggcaaatatcgcgtgcggatttttaccctacttcccaaaagaacatttggtgtatcaatatgcaggtttaaggtttatcgcaggaattggactagccggagaactcggagccggaattaccctcgtttctgaaagtctgccgaagaatttaagagcaatcggaacatccgttgttgccggtttcggattaatgggggcggttgtggctcagttaacggtagaattagcaggaggatggaatatttcttacatcatcggaggaattcttggaattttacttttatttctcagaatcagtgtttccgaatccggaatttataaaaccattgaacatcagtcggtttccaaaggaaatttcctgtcgtttttcaccaataaagaccgtttgatacgatatttaaaatgcattgcaataggattacctacctggttttgcatcggcattctggcggttttagccaatcagtttgcgcctgaactcggaattaaggatcttaaccccggaaaagcaattatgtgggcttacgttggaatttctgccggagatttggcgagcggttttatttcccattttttaaaatccagaaaaatggcgatcttttatatgttggtttttacgattatcggagtcgcactgatgcttttcggaaataccgataccgaaacaaaatattacatcttctgcgtatggctcggattgggaacaggatattgggcaatgtttgttaccctggctgcggaacagttcggaaccaatatcagaaacactgcaacaacaaccgttccaaatatggttcgcggattggttcccgtaatgatcttcgcctttgatcttttcaaaaaagatttttcggtcattataagcgcggcaattgtgggaattattgttttcggactggctttttatgcttcattaacggtctccgaaactcacgataaagatctggaatttacagaataatttctgctgtttaagaaataataatctcaaattttcgttatcagttttaataagcttaagagaataaataaattatcaaaaataatagtaaattatgctttgaataatgaatatttgtttaactttggcacgcaactaaaactaacgtttaacatcaaaaatcacattacaatgcaaaattttttgaaaaaagcaacaaaattaaaaaaagccgatcttaaaaacattactggaggcgtaagcggaacaccggatctttcaaaatgcggatgcagttgttcaggatctgtaacaggaccgttttattgcgttcagtacattgcttgtccgcaggtttatacctgctacgaagctatataagaacttatttcaattagaaataaacatttccacatttaatacgcaaaagccttttgggaccttccaaaaggtttttgtaattaatagatgtcttgttatgaagcaaaaaatattttggagctttatctcgctttccgcactcgctattttcattatttgttctgcggcagcgaagctgccgcagaacaaataatgaaaatgagctcagacaattgctccaatcgaggctagggttgcaggatctcttacggccatcagttaaaatttaaaatatacagcaaacttccggtactgataaaaatccacagaaatacagccaaagcaagaggtttgaaaccgatggttctcagagtttgtaaagaaagggtagaaccgataaaaaacaacgttaagtttaatccagacttcgctaaaacagtaatggaagaactaagttcaccaacaaaaggaaaataagtgttcagcagaatggccagtataaaataaccgataaaccatggaactttcactttagattccttgcttttaaaaataaacatcgtgataacagaaaccggaataatgcacaatgctctggctaactttaccgtagtagcgattttaagcgcttcatttccgtactttcctgccgctcctaccacagaactcgtatcgtgaattccgatggcacaccataacccgaattgttcctgtgtaagattcagcaaatgaccgatcggcggataaacaaacagagcaacagaattcagcgtaaaaacaatagccagagccagtgaaatctgcttcgtgctgggtttaatgatgggagaagttgcagcaatggcacttccgccacagatggcggttcccgcagaaataagataagataaaggtctttcaagcttaaggaattttccggcaaaatatcctaaaatcatcacagtaaaaatgctcataaccgttaaaataaatccggattttccggcctccaaagcttcatcaagttttagcccgaatcccaaacctacaatggaaatctgcaataataaatgaatatactgatgcagactcttttcaaaaggatttccgagaaaaaccgccagtacaaatcccaaaagcaacgcaacaggcgaagaaacaataggagtgaggcagacaattgccagtagaatgaagattattttcttggatctttcatgaaatagtaaacttttcattgataggaattttaaattaatgattcaaaattccgacaattattattacaaagtaaatcatattttgttatttagtataacattaagttatagtgtttgttctaactaattttgaatttaaccgcaaaaggtacaaaaggctgtagtgggatatttaaaatatttcaaagtctgcaaagaaaaaaatcaaagattttttttacttatgtgttctttttttcattaagtattatgattgtccgtaatttgtcataattggaaaaatctttgagttctttgctgagtgaatagtttatgctgagcttgtcgaagcacttttgcgaacttaaaaacagttagtgtaaaaagaatctttgcgagttcttgcgttaaaaaaagagtatgattaatagcggataatcaatttaagtattaaacttaaatgactaaagtgttaaaatcttttgcggtaaaaaagtgtaaacagttttataattggaagccgtttaaatctgatgggtaaattttaagaataagcgaatcaattcagattgttcaccttttggaagaataaaatgaaaatttcgttcaatactgaaatttttaatatcaataatcgttaactgattgcttttcaattcatttaaagccgtgctgatcgaaaggaaagccaaagcatttgaatgcaaaagatattgtttaatactttcgctgcttcccaattgcattacaacattcagattttcaataacaattcctttttcattcaatctgttttggataaactccagagaaccggaaccctgttctcttaaaaccaattccagttcgtacagatctttaacattcagcgttttattggctaaaggatgattcgtttttgcaaccagaacaatttcatcggctttaaacttctgataatcaaaataattagactgagattccccttcaataatgccgagatcaattttcccgtctttcagcagttcggaaatcatttccgtgttgtgcgtaatcagttcaattttaatgtctttataataagatttgaatttggctaaaatctccggtaaaatatattgggcaatggttgtactcgctccgataatcagttttccctgatgtttctgattgatctgatgaatctcaaactcaagatcgcgataaatattcctgatcttttcagcatattcaaacaaaatttttccgctttgcgtcagttgaatagaagttccttttctgtcaaatagtttagtatttaattgattttcaatttctttgatatgctttgtaacggcaggctgcgaaatattcagttcttccgaagctttggtaaaactcgatcttgaagcaacggtatgaaaaacttttaatctgtaatcaaacattgtggttgttggttgttggtttttagttgacggttgatggtttttaattagagtaaaattacagcgttaattgctaacaaatatcaaccatcaacgactctacaaatccgagaaatttttatcatgaagatgttcaaatctacggttttttgcttcaccgatcttttgttttgtataaatgctgttatttcctgaaaacaaatacgatacgatacacgcaattgccacatagattccgcattctgctccaaacaattcaattcccatgagcatacacgcaagcggagtgttggttgcgcctgcaaaaacagccacaaatcccattccggcaagcaaaccgaacggaagcggaataaataatgacaatgcacttcccaatgtcgctccgataaagaaaaggggagtaacttcaccgcctttaaatcctgccgaaagggtaacaacggtaaaaatcattttaaaggcaaaatcataaagcggaagctgtttttcgaaagattctacaatggttggaattccaagaccgatgtatcttgtggttcccattgcgaaaacggcaacagcaacaagaattccgccgataacgggacgaaacggaggatattttatattagatttgaagacagaacctgtaaaatgaatcatcctgctgaaagccgcagcgcagattccaaataaaagtcctgccaaaacactgtataaaatcggtaaaaattcaagttttggaataagttcgatatgatagtgtgtatgttttgctttccagagattggtaacaagatcagccaaaaccgcagaagtaaaagccggaaaaatagcattgtaacgaattcgtcccatcaggaaaacttcaagtccgaaaagcgctccggctaaaggagttccgaaaaccgaaccaaaacctgccgcaatagccgaaatcagtaaaatttttctgtcgtttttatcaagtttcaggatttttgttaattgatcggaaattgctcccgccatttgaagcgccgttccttcacgacctgcagaacctccgaaaaaatgggtgaccatggttcctaaataaacaaaaggtgccattctaaaaggaataatttccttcggttcctgaatattttccagaagcaaattgtttcctgcttccacatcttttccgaaataatgatacaaaagtcccgttaaaaatccacctaaaggcaaaaacgcaatcagccagagatgattttcccggaaatcggttgcccattgcagtgattttaaaaatccggcagaagcacttcctgccaaaatcccgataatactactgataaaaagccatttcagaatataaggcaaagccggatatttcctgaagaaaaaaccagtgtgaaattttattgtacggtttaaatttcgttgatgttgagacataattttcctgatcaattactgttaataatcttttaatcaggcgtcatcagcttttgaaaagcggttgggtaaggaagaacaccatttccttgtgtactgcaaagataaaaattataaatcatttttcagaagatatttctgttttaaatctttgtttacagaaccgtcaaaaattctaaagaaaaggcttcatttcatcctcaatctgagttctcagttccataagacgttttgcatactgttcctgttgtttttcctcttctgtttccggaatccatttcggaacgggaagtttttttccgttttcgtctacggcaacaaatacaatgatgcagtgtgtttttttatcgaaattcggttgtttcaggtttctggaaaatacattgatggaaatatgcatactcgatgaacctgtgtaaataacctgcgcttccacttttacaatttccccgattttgatgggttcgtagaaacggattccgccaacatatactgttacggagtaatttccgctccacgttgttgcacaggcataacccgcctgatcaatccatttcatgacgctccctccatgtacatttccaccgtagttgacgtctgaaggttctgaaataaactgaaaagtgatcggtttgttgtccattctttttaaaatttgaataaaggtatttataatttttaaaattttggattaaatcttacttttgaagaatgaaaatgttaaaattttctcttaaccatcaaaataaatctctcaatgaaaaaagtattttacctgaatacgtgcagtacgtgtaaaaaaataatggctgagtttgatcttaaagactgggaactgcgtgaaataaaaaaagctcccattaccaaagaagaacttgcagaaatgtatgaaaaaacaaagtcttatgaagcgctgttcagtaaaaaatctacccagatcaaacaaagggatatagatgtaaaatctctttcggaaaatgattttaaagatttgctgctggatcattattcttttttgaaacgtcccgttttcattaccgatgataatatttttgttggaaatgaaaagaagaatgtggaagctttgcgggagttttttgatataaaataagtaatgggttttggtttagaaatttattttgtttttgatattgaagaaccccgaaaagaatattcggagttggtaagccattatgattttgatcatagagacggactgaacatgataatgtcgggagaagatgtttacgatgcaggtgataacgaaatgagattactaagacaaatagaaaaagttttagagatagatttaggaatcttggatttttgggaagaatatgaaaaatttatcgaaatagaacctttacgattgaaattgattgaattggaaactgcattggtaaaaaatactgatttctataaaaaaatatgctggggaaaagacatcgaagacagatacctaaagaagaattttgtaatggatgtccgttttttaattgaaagattaaaccttaatattaaaaacggagcttctaaggtaaagtatatttcttgttgataaataataatttttaacgaattcttccaaaacctcacaggtttttaaaacctgtgaggttttttcggtatactaaaaattgcaggaagtgtcaaacaatttacgggaagcgaactgcaactgacggaagttttaaacaaaaccgctttcaaaaattaactgttatgtaaattctttaaagtgtttttcatatgatcttaaatataaattcctttttttcagaccatgattgttcgttatttgtaattcagagttttgatgaaacggaagtttgtcggaaagctgttccgtaaatttttcaattcctttacagtattcgtctagaaattcatactttttatcgactgtaattaattcaatgccggactgagtttctctatacaaaaaacgaatggtgaaagaattaacttccaaaatgtctgaatatttaatgtattgcttcggttctgattcttttttgaaataaaaaccttctgctgtataactgaaaattccgtcttctgaataaagtctgttcatctctttttctgttgattcataatctgttggaaaatttcccgtcattatttttgcaatggtaaaacagagcgtaacaaaacagcagaaaataatgagataagaaatttcttcactgtcaaaaacaggatagaaaatgtaaactgaaataagtacaataatacaaatgaatacaatttttttcatcagaaaaaatttctgcaatagtacgaaaaaatgtattgcgatataattatttagcccggatagaaacggcatcctttatttttttgccggagcgaagctccggcaaaaaaataaagataaagtggatagccggaaacagctccaaaaaaataaccgcctcacaaattctgcaaggcggttttatattcgttaaaaaaaacaatctgttatacaaaaggagcttttactactttggcaggaatgtttttatttcttacctgaatgaagatttcagaacctaatttgaagtgaggtttatctacataagcaagacctaaacctatttttttcatcggcgactgcgttcccgaagttacttttccgataacgtttccttctgcgtctacaacagggtagtcgtgtcttggaacacctttgtccgttaattcaaaacctactaattttctggtaacgccttcttctttttgcttggcaaacgtttctttagatacaaaatctttatcgaattttgtgatccatcctaaacctgcttcaattggtgaagttgtatcatcaatgtcgtttccgtaaaggcagaatcctttttccagtctcaaagtatctctggaagccagtccgcaaggaacaattccttcttctgcacctgcttccataatagcatcccaaagtttttcggcagattcgtttttaaaataaatctcaaaacctccgcttccggtgtaacctgtgttggaaataatcacctcactaactcctgcaacagagcctactgtaaaatggtagtaaggaatttcagaaaggttggtttcggttaatttctgaagaatttcagtcgctttcggtccctgaactgccaataaagacatttcatccgaagcgttcgtcatttgagctccgaaagtattgtatttcgagatatgatcccagtctttatcaatatttgaagcattgacaaccacgaaatatttgtcgtcttccattttataaacgataagatcgtctacaattcctccgttttcgttaggaagacaagagtactgtgcttttccattttccagagcgtctacattgttggtggtaacgtactgcaaaagctctttagaaccttccccttcaatgaaaaactgtcccatgtgagacacatcgaacagacctgctttttctcttacggcaaaatgttcttcagtaactccggaatattgtacaggcatttcaaaacctgcgaaaggtacgattttagctcccaaagaaacgtgtttgtcgtacaatgctgttttcttcatatttaatttttatttctatttctttattttaaaactgtcgaaagcctcgttgaaaagcttcatataatttccgttccagtacttttgtgtacagttgatggtcaccagaaacaaatctttgtctttctgaaaaactttggtgatccagtggagtttttcgtgttcatcatcatattcctaaaaatattctgtgtatcctttttttccgcttttgctttttattttcttttcgtcatccgaagacttgtaaagcgcgagaatgaattttttagtttccgttttcggaagattaagatcgtggtattctgaaatcgtaatagctccaatctcattgcccggaaaaatattgataatatcattatcgttggttactttccagccttccggaagggtgatggagtagttatcattttcatacaccttcgttggaacagactgtgcgaaaagtaaagatccggttaccaatgagatgataagaagaaactttttcatgaatgtagatgatgtttatattcttcaagaatgattttaaaccattctgtaaagttatcaggattttcagaaatttcttggttgagattttcgagagaaatgtatcgtacttcttccacttcatctttatttaaatagaattcgccttcgaaattacctgtaaaaacatgatcaagttcgtgttcccaaagtccgtttcccacatcggctttatagatgaaattaaatttttctgaaagttccacatcaattcccaattcttctttcactcttcttttggctccttcaagataagtttcttcacttctcgggtgcgaacagactgcattggtccatttcagaggagaatgatattttccggaagcccttttctgcagaagcatttcgccattgctgttgaataaaaaaactgaaaaagcgcgatgcagtaagccgttgatgtgcgcctgctgcttttccatcaagccaagaactttgtcttcaggatttactaaaactacgaattcttccattcctacaaatgtaagtgtaataaatgtattttggaaatttttggtgaaacatcatattttttgatttttaacctgatgtgtttcctttatatttaagattttgaatgaaatacagagattcagattttataaaagagaaaaattttaattaaaattgtagtaaaagcaaattaattattgatattattcattaaataaatgtttttaacgtaaaaatttaatataaagcaagtttgataagcctttttgatgcaaaaaatgtaactttgcagttcaaatttttatgatggaattagagtacatagaacacattagtccgattcttaaggacggcgtaaaaaactatttaattgatattgacggaaccattacagaagacgttccgaacgaagagcctgaaagaatggttacctgtgagcctttcccggatgctctggaaaccatcaacaaatggtatgacgaaggtcaccagatttgttttttcacgtcaagaacagaaaatcttaagcaaattacaatcgactggctggataagcacggatttaaatatcacagtgttttatgcggaaaaccaagaggcggaaattaccactggatcgacaatcatctggtaagagcaacaagatataaaggaagatttacagacttggttgaaaaacaggttacgattgaagttttcaaagaagacgagtaaaaaaataaggaaaaagattaaacgattaaatattatgataaatagtttttaatcgtattgattttctcaaatattaaatctataaaagttttatgaaagttttagcaaacgacggtttggatcaatccggtattgatgcattgaaagagaaaggttttgaagtaattacgacaaaagttccgcaggaacagttggtagattacattaatgagcaccagatccgtactattttggtacgcagtgcaacacaggtgagaaaagatattatcgataactgtccttccatcgaaatcatcggaagaggtggagtaggaatggataatattgatgtagattatgcaagagaaaaaggaattcatgtgatcaatactccttctgcatcttcagaatctgttgctgaactggtttttgcgcacctgttttcaggagcaagatttttgcaggattccaacagaaaaatgcctttggtaggagatactgagtttgccggtctgaaaaaagcgtatgcagcaggaattgagctgaaaggtaaaaccatcggaattgtcggaatgggaagaatagggcaggaagttgctaaaatcgctttaggtcttggaatgagagtaattgctgcagataataatgtaggaaaagcaagcattaaagttaagttttataacaaccagtttattaatgttgatattgaaacagaaccgcttcacgatgttctgaaacattcagattttatcacccttcacgttccggctcagaaagacggttatatgatcggaaaaaatgaatttgaaatgatgaaagacggagtagccattgtaaactgttcaagaggcggagtaattgacgaagccgctttaattgaagctttgaattccggaaaggtgaagttcgcaggtttggatgtattcattaacgaaccgacaccatctaaggaaattttaactcacccgaaaatttccatgacgccacatacaggagcatctacactggaagcgcaggacagaatcgggctttctttggcagagcagatttcaagtattttacagattcagtaatttttttgataaaatataaaagctccggcgcaacaaagttgcgccggagtcttgttttataacgaattttttaattcttctttttcagctcatcacgaatttccgcaagcaattgttctgttgcagtaggagcagcaggagcttcaggtgcggcagcttcttctttcttcattttattgatcgcttttaccatgacaaatacaacaagtgccagtaaaaggaaattaatggcaacggttataaaattaccatacgcaaaaatagcggcatcaggcgcaatctctttcgctttggctagagtagctccagccggaatattttcagctccttttcccattgcaaaataaatactgctgaaatcaggttttcctacaatggcagcaacaattggcataattaaatcatcgataacgctggttacaatttttccgaaagctccaccgatgatgacaccgacagcaagatcgaaagcattacctttaatcgcaaactctttaaattcttttacaaatcccataatttatatttttttaagtattattttcacaaaatatgggtttaaattacaaaaaaaaaatataaattttgccttttcataactaaatattaatcaaatatgataaagtgtgaaagtttcttaattaagagatccacataattcttttcagagcatttaaaaattctttttcgtaaattgcttttaatacaaaatacaatattaaatatgaaaatttttacagcggaacagattcgcaatggggatgaatatacaataaaaaatgaacaggtctcttctgttcagcttatggaaagagctgcgcaggcttgtgttgactggatttttgagaattgtaaaaatcatagaaattttgcagtcttttgtggtaaaggaaacaacggaggcgatggtttcgcaattgcgagaatgcttcatctcaaaggttttgatgtagatgtttttaccaataccaaagcgaaattttcttcggatgcgggaaataatttaagggaattaaaagaattttcgggtgttttcatcagagaatttaaagaagcaaaagaatataggtttgataacagaacggtaatcatcgatgctcttttcggaaccggtatatctaaaaatattgaaggagaatttgaagaacttattgatttcttaaatgaaaaaaataatcttaaaatttctattgatgttccttccggactcttcgtagatgctgtttctgctgaaaataccactatttttaaggcagattatacattgagttttcagttctggaaaaaaacttttcttcatcccgaatccggaaaatatgcggggaaagtaaaagttctggatattaatataagtgatgactacattgcagaaacaaaaacagaagattttgttattaatgaagagataatcaaagatattttcagaccgagaaacgagttttctcacaaagggacttacggaaaagtaattattgcaggtggaagttacggaaaaataggtgcggtggttctttctgcaaaatctgccctgaaatcaggagccggacttacttttacactggctccaaaatgcggatatgaaattttacagacttcgaatcctgaagccatgtttatcgaaggaggacatgattttatcgatcattttgaagcagatgaaaaggcagtttacggaatcggtccgggtttaggaacaaacgaagaaaccgcaaagagctttctaaattttctgaaaaattattctcagcctttaattttggatgcagatgcattgaatatcatttcacaggattcgaaaaatttaaagataattcctaaaaattccattataacgcctcatccgaaagagtttgaaagactattcggaaccactgaaaattcttttgaaagagtaaaactggcaaaaattaaagccaaagaacttggaatttatattgttttgaaagatcatcatacacaggtcatcacgccggaaggagatgttttttacaatattacaggaaactcaggactggcgaaaggcggaagcggagatattttaaccggaattttaacctctttttcagcgcagcattactcagaaaaagaagctgcagttttaggagtctggtttcacggcagagcggcagaattggcatcagaaaagcattctaaagaatctgtactcccgacggacatcattgatgaatttggaagcgttttcaaagagctgaatacaaaaatagaaagagcattataattttaacatcaaatgtagataaaaacaaaggcaagtctgattacaaacttgcctttttatattaaatctgtttaaagtttttatttaacctcaaaagatgcaaaagaataactaaacgtttatttaaagttggtgattataagtaataagatcaccacagtttttaaaaatctttgatttttattcttttgagcactttgattactcttgaaatcctctttatcattatcttttgcatcttttgcggttaattctgaaattatttaaaagcttattcaggtttttcgttttcagcctgagtaattttgaattttttagaaacgatcataataattactcctgcaatcatgaacggaatagataaaatctgaccggtgtttaatcctccaaactggatgaattcgtcaccttgcggctctttaaggaattctacaaagaatctgattgcccaaagaataatgaaaaacaatccgaataaccatccctgctgatattttttgttggtttttctgtacagaatccacagtagaacaaaaaggcaaacatatccgaaagcttcaaatagctgtgaaggatatcgcggaactgttacaccatattcactgctctgctgtgggaaaagcaatgcaaaaggagagttgggatcaacaggttttccgatgatttcagagttgaaaaaatttcccattctcacaaaagcacctcccaaagcaaccacaattcccaatctgtcatacacccagaaaggattttttctgatgattttaaatgaataatatagagtggtgaaaattagcgcgatcgttgcgccgtgactcgccagtcctgaaaatccggtgaacttcaaaccgtttttagtactgattggtaaaaatacactccagaaatcttctttgaaaagttcgggctgataaaaaataacgtgccccattcttgctcccaaaatggttcccaacaacgtccatgtgaaaagaggttctaaatatttctggtttacattatcgattttaaaaattctgttcattaaaatatatccgaaaccgaatgcaaaaatgaacatcagactgtaaaaatgaagcgtaacaggtcccaactgaattccctttgtgggatcccagatcttaaaaggagtttccagactgatgttgtctgattctgtaagaggttttgctgtttttactgcatatttaaagcttccgagattttctttggttgccgccgcatcaatcactttaaaattcttgtctaaaagctgataatgaacaagtttatatttcgtcagtgtcgcaatgctgtaatttacataaacaggctcgaaattagactcattcagaataacaagcacattttctttaataggtttgtctgcaaattcattcagatcctgaacttcagtggtcgaataaatttttaccggaacatccgtagagtttacttttaaagttccgtcggacattccgtccggataattctgcgcaacaagacactgggtaatgaacgcaaaaatgacgagatacattctgaaaaaaatattactcattgttatttttttagtagttgtttattttaaattttacttttttggcggtacaggatcatatccgcttcctccccacggatgacatcttgaaattctttttgcacccagccagaatcctttaaaaataccatgcacctgaagtgctttcaccatgtaatgcgaacaggtaggctcataacggcagtttttgggaagcaggggcgaaataaaccactggtaaaatctgatgagaattaccaaaggaaaagtgatgattttattgaatgtaagtttcaaaacaatgcaaaaatagggtaaaaaattgaaaattagtttaaatttgttagaagtttcgggacggtaaaagtctgttcggaggattgttttttcatctttgccgaatttctgttctttgatcattatattaaaaatgattattgttccggacgatttgcattaatattttacttttttaaatctgaaattttgaaccaaaatattccattagctgaaaaattaagacccaaaacactggacgatgttctcgggcaggaacatttaaccggagagaaaggcacgatccggaaaatgctggaaaacaattccctgaattctctgattttctggggacctcccggaaccggaaaaaccactctggcggaaattatttccgaaaagtcgggaaggaaattctataagctttctgcggtttcttcgggagtgaaagatgtaagagatgtaattgaagatgccaaaaagcagaatctcttttccggaaaatcgccgattttgtttattgatgaaattcaccgttttaacaaatctcagcaggattctcttcttcatgccgtagaaaaaggctggattgttctgattggtgcgacaaccgaaaacccgagttttgaggtagtttcggctttgctttcaagaagtcaggtctatgttttaaaagccttgagctatgaaaagctggaagaactgattgatacggcttcggaacggtacaatctggatgaaaaaacatcgttcaaaatcattgaaaaagaagcttttatccaatattcgggaggcgatgcaagaaagctgattaattctgtagagttggttttaaatcaatataaaaattccagaaaatcagaaattaaaaacgaagatgtgctggaagttttgcaggaaacgatggcgctttacgataaaaacggagaacagcattacgatattatttcggctttcattaaatccatgcgcggaagcgatccgaacggtgcggtgtattggctggcaagaatgattgcaggaggagaagacattaaatttattgcaagaagaatgctgatcttagcttccgaagatatcggtcttgccaatccgaatgcattggtaatcgccaacaactgttttcaggcagtgaacgtgatcggaaatcctgaagcacgaattatcctgagtgaaacggcggtttatcttgcggtttcaccaaagagcaattcaacgtacatggcgattaatgaagcattggcattggttaaaagaacaggaaatctgccggttcctttacacttaagaaatgcgcctacgaaattgatgaaagatctggattacggaaaggagtataaatatgcccattcgtatgaaggcaactttgtagatcagagttttctgccggaagaaattaaagaggtaaaattatatgagccgggaaacaacgcgactgaaaagaagatctacgaagaattaaagaaaaaatggaacaataaatactgaaactattcattaaccgcaaaagagacaaaagacaaacatcataaataacctcagttcgggataataaataaatttaaaaaaattgatttatagcattgtattaatttatcgcaaagaaaaacaaaagatttttttacttattgaaagttggtaagctaaacaaaggcacttcgtttatttagaaaacacaaaaatggtattactttgataagttttacgcctttgtatatcttaaaagttgaattcttgataattgaatctctttgtttaaccttgcggttaagaagacttatcctaaactcaggttaaataataagaatatttaaagttctcaaaagaaaagctttaagcaatattactgaaaaaggatgctcaaattggacatccttttctttaaatatgatctgagaaattactttttagaagtcgttacagataccattttcttaccgttactggtaacaacctgcgcgttattgatgatgtctccgtataccatcgtttttgtattggtaaactcgtatccgtcaataagtactggtgtatctgcaggaagcccgaactgcgcattcagttcgtttacaggcattctgtctaatacaggctgattgcttttcagcttgtattctaccaatccgttatctgcaatataatcgaattttttaaggttttgcggaagttctgttgaagatttgtaagctttagagctttgtacagaacttttataatgagtattaaacatatctaccgttcctacaatatcatttgccactgcaaattttgtagctgtattcttctgagcaaatagcgtagcagaagataataataaaaaagagtagagaatttttttcataatgtttcttgaataaatgactattaaaaacttgataaatataggtattttttacaaaatgtaaataaaaattcataatattttaacgattgtttatcgataaaagtttttgtaaaactataaattttcagtttccggcttgtcttctttcgtttccaccagatttttaatgatttttttaagcctttgaaacagaaatgaacttaataataatatgacgcccagaataataaaagcgataattctggatacattatccatttcccagacatcatagagatacagtttcaggatggtaacggcaaccagtgcaaaaccgattttgctgtattctgaaatattattcttcaatcctctgtaaataaaaatacaggaaagaaccgcccagataatcggaagataaagaagaccgaagtgttttcttaaagcttggatgtctgatgttttttcggcattcagcaaaatataaatgttgtacaattcgaagcttaatgcagtgataacagcaagagaaatcatccagtaagataattttacagtaaagaagtgagatcgtggcaacactttcaccataatataaatgaatggaacccaatagagaagataaagtccgtaaaagccagacgatattttatgcagcagaaaattggagacaattcccggacctgaaattactgtatccaatataatcaatacacagaaaagataaataagattggtttccgcagatttcggcatttccagttttttccttaacagcaaaatggtaaaaatatagtacagcgaaaaaatgattccgacactgaaaattacaatccacggttgtgcagaaagatgatacatgatctccagaaggattgcaaaatagataacgccgtagcttaatattaaaaacaaatattcaaaaaaatcattgattttatcatcgtgaccgggatgttttctcagtaaaaataaattgaaaaatgtggtaaccaacgtcacagaacttgtaagaaatacaggattgaaaacaatattcaggctttttgcatcgatatattctgtccaggtgatgatctgtgcaataatgaccaaaggaaagagaacattaaagcattttctgaaaatttcaaggtttgttttcttccatatatataaaaggagtgttgcttcaatagcccaaacactcgttataagatgggttttaaactgcaatgcaacggctaaagttaaaagacttaccgtaactgcggcgaatacagaataatttattccgaaattcttctgagaatattccctgaacagtaaagtggaattcaccaaagcaaaaattagcggaaaaataatcactggttcatagccaagctgatcaaaaatataagcgagtccgatgatgttggtaaagttaattagaacaagcatcagaatatcggatgaagacataacttctttcctgaagtaattttttaaggcaaaaaaatagaaaataagataccctgaaatatagaaataaatgctcttcagttctgacgtttcgaaagcccagtacaaaagataaacatacgtaaagataaaagcgatccatccgatactcttccagtttttaagaaaagcaacggcaagcattccaagattaagaacggtaatgtaggtaaacagaaacagatagttgctgtgtccggaacttaccattaatggagctaaaaatcctccgaataaagagaaaataatcagaatttcacttttataataataggagagtgcgatgcatagtaaagtaatcaggcaggtaacagaaaaagcaatgttttgcgaaaacaaatgatattcccgaaaagcaatggtgactgtaaaatacagcacagcaatcccgcctccggtaataatggaagaaaataccgaatagtttttcctcaaaaaatgaccaagcgaaatgatgacagctcctaaaaagaatccgattcccactctcagcgtttctccgatccagtttttatcaatcgcatattttacgaaatagcagattcctaaaaccaatgtgaagatcccgataatcgttaaagcattttgtttcagaaactcgaagatgatattcatccagtcgtttccttccagttcaggaataatatcctgctctgcatgaagtgtaggttctgcattctgtacagccaaagaaattttctcgtggttttcttcttctttttttacttctggcttttcagcatttaattttgaactcagttctgaaactttttcctccagtctgctgattttactgttcagatgagtaaagatgatcagaatacatagaatgaggagaataacgatcgaataaatcatttttagacttttggttatatcaaatataacaataaacttaataccatataattaatccgccatcaacagatgatatggcggattaattctaaagtaatatttgaactataaaaaaattaattggatactttataaatatagaatgaacctgtgcttgaacctaataaacctaaatccagcaaagaattatttgtaagtccgaaagatattttgtctcctgcctgaagagggtataaagaattaatgcttccttcagaaattgttaagctcaccaatcccagattgatcccgctgaattctctagtatcgataattgttcctgttccggctctgtttcttaaaatcgcaatacttggtggtgtggtaagaactccggactgaagccctgttccgtatctgaaagtaaagccaatggcatagattcccgcagatggagcagtataactaccatcggaatctgagaaaagagatgaggttcccgttgttttttctgccactaaaaagttaaccggtctgaaaccgttaggcaggattccgatattaataagagtaattcctgaagtttttttcgcagaatataccgaagtatttattcccgaattaataacataatctgaaataacctgtggggaaacctgtacgacctgagcgtctccaccggtattctgattgacagcaagaacctgataaccttgaagagtgggagcagcaggtgtttgtctgattttcattgttccgttaacatcaagactagcctgaggattcggagtaccaataccaacccatccactttgagaaaaagctaaagttgacatcgtcgctaaaagtaagctgtagattttagttttcatgctataaaatttaaattagttaatggttttagtctcagttagttattttgaatttacatcaaatagtatgcaataaatatgttaaatgttattttttttcaacaattgatgaaaaattattaaaaaaacgcatttataaccctgttgtattgctttttttgaagataaatttcaattatattacattatgaaaaatatgaaaatcaatattttatgaacataattatagtaaagttagttttttttctgcttacaaccaaaaataacttattaaatctctttaatatgaaatattttaaaaaatttacaaatatgtacttataaattaactcgttagaatatattctctgtaatttcctaagaaatctacctctacattcagtgctttaagctcttccaaagcgtttttgtaaagtgctgattcccagattccggatacattgatgtaaaaaaagtaatttcccagacctgttttcagcgttctggattctatcttgctgaggttcatctttctccatgcaaaaacagacaacacctgatgaagacctcccgcatgatcttcaggaagcgtaatcagcagtccggatttttctcctaaaatttccaaatctttattgtcataagtttcctgcttttttgaaataacaataaatctcgtatggttttgttcaaaatcctgtatgttccggtgaatgatcttcagaccatataaatttgcagcaaactgattggcaactgcagcgaggtttctgtccggatgttcagaaacatgttttgcagcagcagcagtggaagaaaagtcctgtttcgggatttccttgaatgttttatccagaaaatgaaaactctgcgctaaagcctgcggatgagaatatattttttcgatatttgtttcatcacatgttggatgaatcatcagatgatgcgcaatcggcattacagcttcagcttgtatttttatatccggtgttttatacagataatccaacgtcatggaaaccgttccttctatggagttttccagaggaacgacggctagatcaacctctccggtttctaccgcggtaaaacagtctaaaatattggtttgtggtaaaagttcttcattgggaaaaagctgggttgcagcaagctgtgtaaaacttgcctgtggtcccaaaaatgcaatcttcattatatctctgttattatttatttaaatatagcgaaatttatataagccgctcaatttgtacttttaaaagtttaatcttctgtgtctgtgattttgtttgtgtttgtgttattccttccagttctcctcaatcagtttcatcagataatccggacacttcaccactttgttggttttggcatccaaaaagaatagagtagtagaagcttctgtgattttattattttcttcattgaagatttcatattcaaattcaattctcactcccggaattttttttacataggtatgaatttctaatttttcatcataaaaagcaggtcgtaaatacttaattttatactcggaaacaggcaaccaaattccttgattttcaatctcattataagacattcctatgcttcggaaaagctccactcttccaatttccagatactcggcgtagttgccgtaataaacgtatttcatagggtctgtttctccgtaacgtactcttaatgagtgtgttgtgtgtatcatcttaagcttctttatatacatacaaatatatttttaaataatcaatatccacaatatttttttttaagataaaaaaattagacctttgtcgtccttccaaaaagtactaacaactaagaattaatcggggcatcaattatggatgaaaatttaatgatgatatggcagaagtgccttcagttcatgcgcgataatctcaacgcagctgaagataattctgatctgaaaaaacttgaaaaatctttcgatttgctattcgataaggttcagccgatctcattggttgaaaacaaccttacgcttatggttccgagcgatttttacaaggaatatattgaggataattacctgtccctgctttcggctgccctgaagaaaaacataggaaaaggagtgaaattatggtattctgtaatggaaaacaaacctgccggtttggaaagacccgttaccatgaatatgaaaggtaaatctgtacctactccgaaagtacaggaaacaatgccgcaaggtttttctgccaatatcgtgaatccttttgtggttccgggaatccgaaaagtaaatattgattccaacttaaaatcagacttctctttcgataattatgtagaaggagaaagcaacaaatttgcaactactgttgcaagatctatcgctaaaagaccgggtgcaacggcattcaacccattatttttatacggtggttacggtgtaggtaaaacacacttaggacaggctgtaggtctggaagtaaaaagccagtttccggataaagtagttttatatctgtcttccgaaaaattcatccaacagtttatttcggctgcaaaagcacataagcagaccgagtttgcgaatttttatcagatggttgatgttttaatcattgatgatattcagttcctttccgggaaatctgcaacacaggacagctttttccacattttcgatcatttgcatcagaacggaaaacagattatccttacttcagataaagctccggcagatattctggatattcaggacaggattgtttcccgattcaaatggggactttctgcagagatcaaatctccggatatttcaacaagaaagcaaatcatcatcgataaattaagcagagacggaatcgttcttccggatgatatgctggatttcctagctgcggaagcaaaaacaaacgtaagagagcttatcggaatcataaattctgttattgcttactctaccatttataagcaggatctgagcttaactttgttgaaggataccattaataagattgcatccaaccagaaaaaagtcatcaacattccttatattcaggaagtggtttgcgattatttcgggatcaaaaaagagcagcttttatccaaaacaagaaaaagagaaattgcgcttccaagacaattggcgatgtatttttctaaagagctaaccaacgctacctttaccaaaataggggaagaaatgggcggaaaggatcactctacggtaatgtacgcttgtgataccattaaagatgtttccaagatcgataaagaggttaaaaagtacgtgaaggaattgggagagagaattaaacagtaagaaataatttaatttgaatacagaaaatggagaataattttattcttcattttttatttagttttgttacctgaaacattaaaaactgagactgagatgaaaatattaatggtatgtctgggaaacatttgcagaagtcctttagcagaaggaatcatgaaagcaaaggctcctgaaaattttgtaatagattctgccggaaccatttccatgcacgaaggaaatcatcccgacaaaagagccattaaaaccgcttcaaaccacggaatagatatttcgaaacagagatcaagaccgataacgtctgcagattttgaaacatttgataaaatttactgcatggatgtcgatgttttggcagatgtggtttccaaagctaaaaatgaagaacagcgaaaaaaagtgtctttatttcttgaagttttaggcgatcatgaaaatgctgaggttcccgatccttattggggagatatgcaggaatttgaagacgtctatcatttgctggatcgtggctgcgatgctgttttaaataaaatttcaaaataattatgaaaaaatttttcgtcctttttcttttttacagcagttttgcttttgcccagacaaaagatgaaatcgccatccgtaccatgatggatgattttatgatgtgcattaaaaccagagatgaggcaaagtttgtatcgctttttcaggatccggttctctggacgggagtgtatacagatcgtacctttaaaaaagtgataacagaatatcccgacgaaaaaatttattttacagataattataaagccttcattaaaagttttaaagacaataaatcggaagaaaaattcgataacgtgaaaattatcgaagacggatccgttgcttccgctaatttcgattacagtttctggcatgacggcgaaatgctgaactggggaaaagaaatctggacgctgatgaaaacggacggcaaatggaaaattacttccgtttctttttccatggatcttacaaaatattacccacaaccttctttaaaagaaagaacaaaaaaataaaatcatgctttttttacttcctgcttatctttcggaaaacacctctattacgcatttttcaccagtgattagagagtatatcatgcagaccgattacttcttcgtggaaaatgaaaaaaccgccagaaaagtggttaaatttttcgctcctgaaaaaaaacagtcggagctgaaactttttttgctggataaatacacagaaaatgcagatattaaagaagcgcagcaactgatgctaaaaggtcaggatttcggcttgctttctgaagcgggacttccgtgcattgcagatccgggaaatctgatggtgaaatggtgtcatgagaaaaacatccgcgttatcccgatttcaggaccttcatcgattattttagcgctaatttccagtggctttaacggacaggaatttactttcaacggttatcttccgattgataaaagtgaaaagaaaaaacagattcttcagctcgaaagtctggttcagaagacaggatattcgcagatttttatggaaacgccttacagaaataacgcgctttttgaagatcttacgaaatttttatcacccaacacaaagctttgcatcgcagcaaatattaacgatccggagcatgaatttatcaaaacaaaaaacattaaagaatggcaaaagcaaaaaccggaactccataaaattccgacggtatttgttttggggaaatagaaggttttataatctcccgcagattttttgtagattgtttatataaaaaagatgttttccttcgtcaagctcagaataaactttgggcttagcatgacatattaaatactataatttttattttgtagcggtgtcagactgagcttgtcgaagtctttgtaatgatctgatattgaaaacatctttatcatttgcttttcttcctgtttctccactttctccatagaaatacaaccacaggaatcagcagaaagaaaggccaaagcgaaataactcctaaaagaaaagccacaaaactgttccagccttccgttaccgaatctccgaaacggcttccgaaaccaatcttcgaagtggcggaagttcttactttttctttgtataaattcagatttaaagtgctgtaattcacgcggtcgtctataaaacgaagtctgccttccgaaacatcaatttcatcttccagttcacggatgttttcctgaatttccaaaatgtctttagttgtttttgcgcttttcagcatatctctgtatttctcgagataaatctttttattggcaagtttgatggaaacatcagtatattcttccgttacatcatctgaagagatatttttagacaaaaccgaaccgacaccatctgaaaaagaattcaccaaagcatcgaaattctgatgaggaactctgatggttaagtcgatattttcctcattgtcattattctgaaactcttctttctgaatataggctttgttgctttttacaatgctactcacctgatcctgagcttttttaatgtctccgacctgaattctcagatcaccgtttttgatgatttttttggaaatagcagtggtctgttcacttatcgtcttttctgatggaaaccttatggaagcatcgactacgggagattttaatgctacagcagaagagtctattgcaatcaatttatcttcctgagcaacattaaccaaatttgaatttaaagagtgagcttcattttttttacaatagataaggagtaaacagaataatggcagaaataattttttcatgaataaaagtttcggtaacatgatcaaaaatcatgcttaaaattattttttaaagaatgaatttctatttttagcctgatcgcaaatgaaaaattgaatttattttatatttttaatgaatgaaaaagagtcttttagccatcatttttttaccgcttcttgtgtttggtcaggaaattccgaaacttaccgatgaaatggcggtgagattatctgaaaagccgcttcactgcatcaatcaggaatatccgaacaaaacggcgcatatcatcaataaagaaaaagaagttcctttaagtcctaaagatcttcatcccagtttttatggttgtttcgactggcacagctctgttcacggacactggatgctgcttcggctgctgaaaacaaaaccgaatctttcggtggcaaaagacattgaaaatattctcgacaattcatttaaaaaagaaaatttacagactgaagccgattatttcaccaaatatcaactaaccggaacattcgaaagaacatacggatgggcatggttgctaaaattagacgaagaactggcaacatggaatcatccgaaagcaaaaatatggcatgagaatctaaagcctcttaccgataaaattttagcttcgtggaagacttttttacccaaacaaacttatccaaacagaacaggagttcatcccaatacggcttttgcaatggtttttgcactcgattgggcaagagcgaccggagataaagattttgaaaatcagctcattgaaaaggcaaaatatttttatctgaacaataccaaaacgcccgcttatctagaaccggacggatcggatttcttttcgccaagtctggaaattgcagatctcatgcgacgcgttttaccccaaaaagaatttgtagtgtggttaaataatttctatgaaaagcgaagcttggaaaatattgaaaaaattccggtggtgagtgatctatcagattatcagacggttcatttggttggtttatctttttctaaagcgtggtgcatgaaaggaatcgctaaatcgcttcctgcaaatcatcctttgaaacagaaatttgagaaaacagccaaagtatttttaaacaacggattgccgttgctttttcagggaaattacgggggagatcattggttggcaagttttgccgtttatgctctggaagattaataaggttggaagttagatgtcggaagagggaagttgtatagcctgaaaaccaacttccatctttaatcatccgttccagttatcaatcatcaatcatcaatcattaccattaatatctgattcccagttttttaagaataaaactcaacagccagatcggtcctaccaaaaggaactgcaaatctttcaggaaagaaggttttttgccttcaatcttatgtcctacaaactgaaaaatccacgttattacaaaaacagcgaggtaaaccatccacgatttttcttcaaaacggatattgattccataagcgaaactttccattaaaatcatcacgaaaaacatgatcagaccgatcaaaaaagaaagtctggtataaaaaatagtcactaaagcgatggcagcaaagcttatatagctgatttcgccgatgtacctgaagccaattgattttgaaggaatgatagaaataaaacctaaaattgtccagaaaattaaaggaacacagatccagtggatcagtttattggtcgagtttctgtggctttcggcgtattctgcaaatagtaaatcaatttttctcatatctttaatttggaaaacactaaaataataaatttttgtgatcgctcaagagattgcttacatttgtactatgtctgtcttagaaaaattcggggttgaaatctttacgcaacataatattttcgagagaatttctgtcgataaaccgttccgtcctgataatccggcgtttatctttgtgaaaaccggaagtatcaagctgaaacagcacttccgcgatcttgagctttccgccaatatgtttatggtaacagatcctcaaacggtgtacgaaatgatctccatcagtgatgattttcaatcgagaatggtttcgtacaagcgtgaatttatttcggctttatctttgaaattcaacagattaattacgtaccgttatttcaggcagcagatgaacattggtgttcctttcgaaccgaatgaattggaagtggtctggaaaagtgttaatttcctcaaatacattctcgattctgagacagaaatgacctacaagaaagaaattgttgaacatcttttttccgttttctgttatcagatggcgggaattatttccaaggaagacagcaattccatgagccagatgtccagacaggaagaaattgtttttattttcctgaatgatctcgcgcaacaccacacccatgagcgaagcgtggagttctatgcgcaacgtcagtcgattacaaccagacatctttcggcggttgtaaaagagattacgggaaagtcggcaagccagattatttcactgattgtgatgaacgaggcaaaagtgctgctgaactcttcaaataagccggtttcggagatttccggtattctcggttttagtgatccttattctttttcgcacttttttaaaaaacatctgggtgaaagtccttcccagtacagaaatcagttcgaaaactaaaatcttacatttgaacatctttttccaattcttaaacatttgtttgagttcgttgctgccgtaactttgtatccgtaaaacaaggtaaaatggttaagaacataaaaacagcgctatcactcgtgatagccttatttcctgcgctgtttttttcacaggaaataaaacagctcaccgcagacgaagttgccgaactcgcggtgcagaatcatcagcaactgaaagtttcggcacagaatatcgacattgccagacagaacacggaagtggtaaaactacagaaactgccgaacattacagcttctaccagtcagttctacttaggcgatgccgttgctatcgacaaagatttctcaaaatccaccaatgttccgatgccgcactacggaagttcgtatgcggttcaggcaacacagcttatctttaaaggtggattggtgaacaagtctattgaaatggcgggacttcgtgagcagctttccaaacttgatctggaaaagaataaacaggacgtaaaacttctggtcatttctaattatctggatatttataaaattttaaatcaggaagcagtttttcagaacaataaaaaactggctcaggaaagactgaaaaacattcagaaattttatcagcagggaatggtgacgagaaatgaggtcattcgtggtgaactggcaatcaaaaatttagatcagggtattttaacgttaaaaaacaataaaaaaattctgaattataatttaagcattgctttggggttgcctactgatacggaaattgttcctgtagaaagtttacagaacaaagaatcgggaatcgggatcgagtattatgtaaatctcgctcatgacagcaatcctttgctgaaatctgcgaaaacaaacattgatgttgccgacaaaaatattgaaattattaaaaccgacagaatgcctacgatttcaggttttggaggatattctctgcaaagaccgatcactacaagaaatcctgttttggatatgtattccggtggttggcaaacggggatttcattaagttacaatattgataatctttttaaaaccaaagaaaaagtgaagctgggagagctgcagaaaacgcaggcaaatgatgccatgactttaacgcagcagaatattgatatggctgtaaatgcggcatataccaaatatcaggaatcgattcagcaggcggaaattttaaatgatgctaaaaaactggcggaagaaaactataaaattacggaagctaaatatctgaatcagttggcggtacaggcggaaatgatcgacgcgcaaaatcagaaattacagtcggagcttgattatgcgaatggagaaatcaatgtgctgtatcagtattacaatcttttaaaatctaccggaacactttaatatttaaaatttgaaaaacaaaatggaaaacaaggaacaaaatacacaaaatacaactcaggcttctgccaattcaggagcggcaaccaataaaaaagaacgaaagaaaaacagaatcaaagctgtcatttccaatatcgtggtttttgccgtcatcggttttggattgtactggctgatagcgcaatattttcacatcggtgataaaacctatacggaagcggctcaggttgaggaatttatcaaccctattaatacaagagtttcagcttacattaaagaaataaaattcattgagcatcaaaaggttaaaaaaggagatacgcttgttgtattggatgaccgcgaaattttaacccagatcggacaggcggaagcagcgtatcagaatgctttggcgcaaagagcggcaacaagttcatcggtgaatacggtttccaataacgtgaatgtaatggaatctaatattgccggagcaaaagcaagactctggaatgcggagcagaatttaaaccgttataaaaaccttctggcttccgaagcggtgacgagacagcagtacgatcaggtaaaaacggagtatgatgcacaaaaagcggcgtatcagactttaatcaaccagaaacagtcggcaaatctttcaactgtagaagttaaaagtaaattcgggattattgatgcagaaattaaacgaacaaaatccgcattggatatggcgaaaattaatctttcctacacggtaattaccgcgccttatgacggagtgatgggaagaagaacgatttctgaaggacagttgattcagccgggacagcaggtggcaacgattgttttgaacggtcagaagtgggtgactgccaattttctggaaagtcagatgccgaatgtaaaaacaggagaaaaaatgatgatgacagccgatgcattggcaggaaaacaatttgaaggagtggttacagcaatttctgcggctacaggttcaagatactccaatattccgacggataattctaccggaaatttcattaaagttcagcagagaattcctgtaagaattgagtttacgccttccaataaaaaagaagacatcgaaaagctgagcgcaggaatgaatatgaatattgtgattaaaaaataagaaggacagaaagaaggatgaggaaaaccgaggttaatgtatttgtaaaatcatacatcttcagactttcagccttcaaatcaaattttaaaatatgtacaacagaggattataccgggattgggtaccgaaatctgttcagcttttactgatcgtgcttttactggcgatcgtgatgcctttgggcggtgtttacacaggaaacatcagttatatggtgggcggaaccggtgcgctttcggaaaattatatttttgcgaattatgcttccacgatcggaatgggagcggcaatgccgattgttcttaggctgaaaatgcggtttaagatcagggataaaattacggttgttctggttcttttgggaattttaaattacattaatgcaaccacgtttcagccttctgtaatcatcggaagttctcttctgatcggtttctttaaaatgattgttgcgatcgaattatttttacccgttatggcaatgatcggaaaccgtggtgttttttacggtgttttttattcttttatcctgattatgaaccagattgcggggtattacgccgtagaagtttcagttttgtataactggcagcagtttttcgtccttatttcgattttgtgtttcggacttgccattttgcagtggatttttatgcacgatcagtattttgctttaaaagttccgcttcattatattgactggttgagtattgtgctttttgtggcaacgtttatgttttcggcgtatgtttttgctttcggaaaacagcaggactggctgaattctaaaaatattattaatgcatcgattggcgcttttataagttttgcgcttttggtgaccagacagacgcatctgaaaagaccttatttatcattcaaggttttttcaaaaagcaatgttcttcacggattgtttatgcttctttgtctgggaatgtttatggcaacggcaacgttacagaatatttttgcagtcggagttttgggatacgaccaattaaccaatgcgaagctgattcttatgatgattcccggaattgtagttgccggaattgtggcgattatctggtttaaaagagacaaacctgtgaaaatgtatattttttccggatttgcagcgatgctgggatattcagttattatgtatttctcgatggttttggagtttaattatgacaactggtatcttcctttattcctgaaaggttttggaatgacggtattgtttatttccgtttggtattacacgttggataagcttgaacttgatgatatgatggctgccatcggattggctttggtctggagaacttttcttacgatcggtttcttttcggcagtgttttcatggtttcagtaccgttttcaggtggaaagtttagggaatctggcggtttatatggatggattaacggtgagttcacaaagtgtggctgccaatctgaaaggaattcagctcaatgccattattgccgccaataaaaagattttcggatatatcgttattgccggtttcggaattttaggatatattcttacgcatcattttggaagagaacgttttgtatccacaagatttataaaagtgttaaacggaaaatctgtaattgccagaagaagacttttggaaagaaaaagattatccgaagaaataaaagacgcagcaggtcctgcgatgtaaagaaccttgtttttcatttactgagtcaaagctccattttaattgtaaagtggggctttgcgttttgagaaagtttaaaaatttaaagttaaaaattccgaatattaattttagaattaaaatttgtgataaactaatttcagaattaaccacaaaagggacaaaagataatgttaaagcgaatttccagaataatcaaagtgctcaaaagtataaaaatcaaagatttttaaaaactattgttttcttttgcgtttataataatcaactttaaataaaaaatttagtagatcttttgtgacttttgtggttaaataaagtttaaacagacttttagttaagtgcgtttttcacaatagatgtccatttaaaaatttcaaaaacttatctttgtaccatatatcaaactatgaaagatttaatggggaaagccatttgggatttttatcacaacgaaaatcctgaagatctgcagaccgaaacttctatttccgaactggatgaacttcctgtaaaatatctgttccgcgattttgacggaatgaatgcaatcgagcaaaaagccctccagcttgcaaaaggaaaaacattagacattggagcaggagcgggttctcatgctttgtatcttcagaatgaaaaaaatctggatgttaccgcattggatatttctccgaaatccattgaagtctgccagttaagaggaataaagaaaacagttgctgaaactatgcttcatttttccagagaaacatttgatacaattattctgctgatgaacggaacaggaattttccaaagtcttcatgtgattgatatttatctgaaaaaacttcattcgcttttgaatccgaacggacaaattttaattgacagcacagatattctgtacatgtttgatgaagatgaggatggcggagtttatattcctgcggaaggatattacggcgaactggattatattgttcattataaaggagaatctgaagatccgataaaatggctgtatctggatttcaataccttaaaaaatgcagccgagaataatggttttaaaatagaaaaagtgttgcaggaagaggattcttatctggcgaaactgactaagaaataactagtttttgtcattgtgaggagcaaagcgacgaagcaatctttttattaataaacccgttcaaacttttttttaacaaaagaagcaaaagatttaacactttagtttcttaagtttaatacttaaatgaaaaaagagcacataagttaaaaaaaaattaaagattttttctctttgcagacttttgaaatactttacagaaatccaataaagtctttttgtatttttcgcggttaaatttaaaattagtttaaacagcttcagtcttaatgccataaatcaatcttaatgtttcaaattttaaccattaagattctgttaaggctttaagaaaagttaagtctgaatgttattttttaagtttgagattgcttcgtcgcttaagctcctcgcaatgacagtaaaaacaaaaaaccacatgaaattcatgtggttttttatatttaaaatattaagattatccgatctcaataccgttttcaacattgctgtcatcaggcgttacgaaagataattttccgtccggttttgtggttaaaagcaacattccctgagattcaattcctctgatttttcttggggcaagattcaataaaatcataacctgctttccaacaacttcttccggggtaaagctttctgcaattcctgaaactacagttcttacatccactcctgtatcaacagttagtttcagtaatttatctgctttctcaactttttcagcttctaaaatagtggctgttcttaagtcgattttcataaaatcatcaaaagtgatttcttctttcataggttttgcgttagggtttgtttttttattgttttgcttggtctgttctaatttttctacttgagcttcaattactttatcttcaatttttgagaataataattcggctggattaattttatgtccagattctattaagttttcaaaatctaatctctcagttacagaattccaatctagttttttaacattaaacatctttaatattttttcagatgtaaatggtataaaaggttctgaaagttgtcctaatgctactgcaatttgtgccccataataaagagaatgagcagctttttcgggactgtttgtaattgttttccaaggttcttcagcctgtagatattggtttcccaatcttgcaacattcattaattctactaaagcatttctaaattcgaatttttctaaatattcttcaatttttagtgaagattttgtaatagtcgaataaaatgttagataatttacattcgtttctaaatcatctgtttttggcttttcaggaacaactccatcataatatttatgaattaacacggcaactctgttgatgaagtttccgaaaattccaaccagttcagaattatttttcgtctggaaatccttccacgtaaaattattatcttttgtttcaggagcggatgaaagtaaggcatatcttaaaacatcctgttgtcccgggaaatcttctacatattcgtgcgcccaaaccgcccagtttctggaggtggaaattttatcgttctcaagatttaaaaactcaaaagcaggaacatttttaggcatgatataatctccgtgagctttcatcatcgcagggaaaataatacagtggaatacaatattatcctttccaataaagtgaaccagatcactttcctcgctttgccagtaatctttccagttttttccgtttttctccgcccattctttcgtgaaagagatatatccgattggcgcatcgaaccaaacgtaaagcacctttccttccgcattcgggagcggaaccggaacaccccagttcagatctctggtcatggcgcgaggttttagcccatcatttaaccatgatttcacctgtccgtaaacattcggcttccagtcgtctttatgaccttcaataatccattcattcaggaaatcctcatattcatttaatggtaagtaccagttttttgtgtctttcaaaataggaatgtttccgcttaacatggatttgggattaatcagttccgaaggtgaaagggtagtaccgcatttttcacactgatctccataagcgttctcgttaccgcagttcgggcaggttccgacgatgtatcggtctgccaagaattctccagcctgtttgtcgaaatactgctcagacatttcttcggtgaattttcctttttcataaagaaccttaaagaaatcctgactggtttcgtaatgatttttagaagttgttctggaatattcatcaaaagaaatccctaaatctgaaaaagattttttaatgatttcgtggtatttgtctacaatatcctgtggtgtaaccccttcttttttagctcttatggtaataggaattccgtgttcatcgcttccgcagataaacgctacatctttccccaatcttctctgaaatctcgcatatacatccgcaggaatataaacacctgccaaatgccctatatgaaccggtccgtttgcatatggcaatgccgccgtaatcatctttctgtttgacatttatagtaaagttttagggtgcaaagataagcattatccatgaaaatctgatattgtctgtattttgaagctttacgggtaatttgaagatgtcaaatattacatttagttaaacaattgtttaactttttgttaattttaaaccagtattatgtattgcatattttaatgtaatgatttgaaaaataaatatttaacttaaatggatcgtttaatatacataaatttatgttaattttaaataaatttatcataattataatttttttataaattgcaacgcaagcaggaatgcttatttaacaagaacgaaactatataaaagaaatattgtgaaaaactttacaacggtattaaaaattgcgcctgcatttttattggcaagtacaatgattcatgcgcaaacaaaagactctgttacgaaagagaaaaaaatagaagaggttgttttgattgggtatggtaaacagaagaaaacggatcttacgggagccataacttctgttacagcgaaagattttaatggaggagccacttctccgggacagcttatccaaggcaaaacgccgggtgttcaaattacaagtaatagtggagctccaggtgcaggaacgtcaattcgtgtacgtggtatttcctcattaacaggtaataatactcctttgattgttattgatggggttcctcaggattttgttggaataagtggagcttctgatcctttatccttaataaatccaaatgatattcagagctttgatattttaaaagatgcgtcttctactgcaatttatggtaacagagcttcgaatggtgtcattttaattacaacaaagcaaggttctgcaggaaaattaaaaattaacttctcaaccctagcttctgtatctgaaaagatggggaatgtagatgttttagatgcggatgcttttagaaattttgtaaatacttatgcacctaacagttataaatctcgattagggagtgctaatacaaactggcaggatcagatatacagacaaggatggggaacagataataatctttctctcacaggaggaattaaaggattgccttatcgtctatctgtcggttacaatgaacagaatggtattgtaagaacaaattcatttagaagaacatcattaggtataaatttaaatcctaaatttcttgataatcatttaacggtaaatgtaaatgcaaaaggaacatttacagataatcaatttcctgccggaggagtaattggtgatgcaacttattttgacccaacccagcctgtttattcgggcaattctaattatgggggatattatgaatggttattaaatggggctttaaatgtgaacggaactccaaatcctttagcaaagcttgaagcaacaagagatatatcttctgttgtgagaggtttaggaaatattcagcttgattataagttacattttctaccagatttgcattttaatgtaaacgcgggctacgattatagtaaaagtaatgggtcaactacaataaacccattatataaagtaggttttgcaaataaaggatcttacagagaatatagtcaggagaaaaagaacagtttattagaaactttcctgagctatactaaaaatattactgccatagatactaatgtggatattgttggtggatattcttatcaggattttagaaattatgtaccttttgcgccaacatttacaggtgtaaatcctccaacagtaggaaataactatgaagatagaaaagttcttgtttctttttatggtcgtggaatatttactattgctaataagtatatcatttcagcttctgtgagaagagacggttcttcaagattttataatggatcaacagataatctttggggagtgtttcctggtgtgtctgtagcttggaaaattaatgaagagggtttcttaaaaaatatttcttctatttctaatttgaaattaagagcgggatggggaaaaacgggtaatcaggaaatcacgggtggtacatatcccgcatatgctgcttataatcctagccaaagtggagcctcttatcaatttggcaatcaatattacttcatgtacagacctaatatttataatccaaatttaaaatgggaaactacaactacaaaaagtttaggtttggattttggctttgtaaaaaatagaatatatggatcatttgatgtatatcagaagaaaaccgaagatctgattttggattctcctatcgcagcaggagatttaagtaaccataatattctgaatgtaggaaatatggaaacaaatggtattgaaggttcaataacttttgttccggtaaaaactgagaaaacaacttgggaattttcttttaatgcaacacattatgattcaaaaattacaaagctgataaatggtgctgatgatagttttaacttacctgtaggaggaattacaggaggagtaggtaatacaattcaagctcatgcagtaggttatcagccatactctttttatgtgtatcaacaggtttatgacaataatggaaaacctttagatggtgtgtatgtagatagaaacggagatggtgttattaacgcaaaagatatgtattattacaaatcaacacaaccggatgctattttagggtttaatacaaaattaacacataataactgggattttgggtttagcgcaagagctgttttaggaaattatgtttacaataatgctgcatctaacagttcattacaatctgctgcaacaaatgattatttacaaaatgtatactctacaactcctgattataaattctctcttccaagatatctttcggatatttttatagagaatgcatctttcttccgattggataatgtaaatgtcggatataattttaaagactttatgtacaaaggaagtaatttaagaatatatggaatggcgcaaaatgtttttgtgattaccaaatattctggggtagatcctgagatttttggaaatattgataatggatattatcagatgccaaaagtgtattcattaggtcttaattttcaattttaataagtatgaaaagaataaaatttaacaaaataaatacagcagtagtactttttggtctacttgctacaacttcgtgtgttaatgatcttgaacagtctcctattacagatgtaacctctgtaagtgtctttaaggattttgcaaattaccctaatgccttagcaaaagtgtatggaggctttgcaaatggaggtcaggaatcaggtggagggaatgccgatatcaatggtattgatggaaatttttctcaatacaccagacagctttttacaatgcaaaacttgccaacagatgaagctgttatcgcatggaatgatggtactttgcaaacaattcataagatgacttgggactctcaaaatgaatttatcagtgctttatactatagaatatatactgaaattgcattttgtaatgaatttttgagaaatgttaccgatgaaaaactggcttcaaataatattacaggagctaatcttacggaagcaaaatatatgagagctgaagtacgttatcttagagcattatcttattatcatgcacttgatctatttggtaatgttccatttgtaaaagaagattacctacctggatcaataagtccgccaccaagaattacgagagcagaacttttcaattttgtagaatctgaattaaaagatgtagaaggtcaacttaaagatccaaaaacaaatgcatacgcaagagctgataaagcggctgcatggtctttattagccagattatatttaaattctggagtttataatggttcaaatcattatacagattgtattacttattgtaataaagttattcaggctggatattctttaaaaaccaaatacggagatttatttttagctgataacgacaaaaataatcctgaagtaattttgcctattgcatttgacggacagagaattcaaacgtatggaggaactacttatatggtacatgctgcagtaggaggtagtatgcctgcttcacagtttggaatcaatggcggttggggaggtcttagaactacaaaggctttcgtaaatttatttgccggcaacagttccgatcaaagaggtaatttttatacaaacggtcaaaatctggaaattaataatctgggaacctttacagacggatatggttttattaaatataaaaatgtaaccagtagtggtgttgcaggatctgataatgcaggtaactttgtagattcagatattgcagtttttagattagcagatatctatctaatgtatgcggaagcaacattaagaggtggttctggcggaaatcttactacggcaattggatatgttaatgcacttagaaccagagcaggagcaagcactgtaggatctatcaatacagattatatacttgatgaaagaggaagagagctttcatgggaatttaccagaagaacagatttaatcagatacggtaaatttacaacagcttcatatttatggccttggaagggaggaataaaagatggaaaagctgtagaagattttagaaatctttatcctattccggctaaagatattattgcgaatccaaatttaattcagaatcctgggtattaacaaaaaacacttttttaaaatgaaacatttatttaaaatattcacactgtttgcggtagcatttattatttcttcttgcgagaaagatgaggatctagctgttgtaaacgatgggacgaatccaacagtttctgcaaataaaacttcagttgttttaattaacaatcagtctgccaatgaggctgttgcgtttaattgggtaaactcagattttggggttcctattcaaattaccaatcaattgcaatttgctcttaagggaacgaattttgccgctccaaaaattgttgagctttcggcaggggctaaatcttacagtatgatcggaaatgatcttaacaatataattttaggattaggagtaacttctgtcacagctacagatattgaggttaggataaagtcaacggctgttggtaaaactcactattcaaatgtaatttcattaaaagttacaccatttattaatggtcctatttatacttatacagatctatacttaataggtgatgctacagcaggagcatgggacaacgtggcgacaaatgcaaaaatttatccgttactaaaatcatcagacccaaatatctatacttacacaggctattttgcacagggaggatttaaaattattaaaactccaggagcttgggatccacagtacggaatgggttcgtctgcaggagtattaagtacaagtggtggttctggaaatattactattactggttcaggatattataaagttactatcaatatttcttctttaacatataccgttacggctgtaacaccttcaacaactacatatacatctatttctttaattggtcccgcagccggaggatggtctacggatttagatttagaaaagtctacttttgatcctcatgtatgggtgaagaaaaatgtaatgctaagttcaggagaatttaaattcagagctaatcatgattggggaacaaactggggattatctcagcagtactttggaacagcgttattgggtggaggaaatatccctttagcaacaacatttaattataatgtttattttaatgatatgacaggtgatttctctgtaattccagcgaattaatcaaatcatgtttccaataataattttaaattgaattttacatagcaaagtgttgcttttcggcaacactttctttatttttaaagtctataaatagtcattatgaagaaaattacagcaggagcaatcatgctctctatgatgtttgcgggtgttaatgcacaatctttaaaatcgccggatggaaaattcgaaatggatttccagttgaaacagggcgtaccttattacaatcttaaatataacgggaaaacgatcgtcgaagattccaaattgggactcagattatttaaagatacttcaataaaatttgcctcagaaattgcaaaaccggaagatgtaaaatttgatcttaacaacggttttacaaaagtggatgaaaagcgtgatgctaaaaacgaaacgtggcagccggttttaggagaaaagaaaaactatatcaatcattacaatgaattggcggtgacgcttaatcagacttccacagacagaaatattgtggtgaaatttagactgtttaatgatggtttaggtttcagatacgaatttcctcagcagaaaaatctcaactatttcgtaatcagagaagaagattctgaaattgattttcctacagatatgaaatcctggtggattgttgcagattatgattctcaggaataccagtatcaggaaacaaaactttctgaaattcctgcaagatggccaaaagctgcagatgcaaatgcttcgcagactttaattaaaaatgccgttcagtcgccggtaatgttgaagcaggaaggaaaagaaccattatacatcaatgttgctgaagctgccgttttagattatccggcttctcacttagaagttgatgcacagaattttaaattaaaaacacatcttacagcagacagacagggtgcgaaaggttacattcagactccttccgtaactccttggagaaccattatcgttgctccgaaagcagaagatgtaatggattctaaaatgcttttcaatcttaacgaacctacgaaatatgccgatacttcttacatccacccaacaaaatacatgggagtatggtgggaaatgatcatcggaaaatctcagtgggcttatggacagccggaatctaatgtacgtcttggtgtaacagatttttctaaactgacacctaacggaaaacacggagccaacaatacaaaagtgaaagaatatatagatttcgcagcagaaaacggttttcagggacttttgattgaaggctggaatgttggttgggaagattggtttggtcactcaaaagaatttgttttcgatttcatcactccttatcctgatttcgacatcaagatgttaaacgattacgcacattccaaaggcatcaaactgatcatgcaccacgaaacttcaggttctgcaacgaactacgaaagatgggcggataaagcgtatcagttaatgaacaagtacggttatgatgccgtgaaaacagggtacgtaggagatatgattccaagaggagaacatcattattctcagtggacaatcaaccatttttacagaattgctgaaaaagcaaatgaatataagattatggtaaactcccatgaatctgttcgtccgacaggagaaagcagaacgtatccaaactacatttctgcggaagcagcgcgtggaacggaatatgaagctttcggaggaaataatcccgatcatcagaccattcttccgtttacaagatggatgggaggttctatggattataccccgggaattttccagacaaaactggattactatttccccggagacaagcgtttcgtaaaaacaaccttagtaaaacagttagcgctttatgtggtaatgtatatgcctcttcagatggcggcagatttgcctgaaaattacaaaaagcacatggatgccttccagtttatcaaagatgtagcagcagactgggacgatacgaaaatcttatcggcagaaccgggagattacatcatcacggcaagaaaagcaaaaggaactgaaaactggttcgtaggtggaattaccgatgaaaacaaacgagattacactgtagatttttctttcttagacaaaggaaaaaaatatgaagctacgatttacgaagatggaaaagatgcagattacatcaacaatcctcaaagctataacatctacaaaaaagaaatcacaagcaaatctaaaattaattttaaaatggtacgaagcggaggttttgccatctctatcaaacctgtaaaataaataatacagaaactgctaattccttaaaggtattttcctttaaggaatttttttggcagaaaatagatagattaatttaattttcattaaagaaacaaataatagcaagtacttagctgctattatttatgataatttgattatctttaattatatgaaaaatatgaagaaagcagttttgctgatgatgataacaacaggacaattaatatttgcacaaagcatcagtcagattctaaaaaatgaaggagcattcagaaaagatactgttttatcggttaaaagtgattcaaaagaaactcatttaccggtaattataatgaaaggaaaaataaaagatcccgtttttactattgtagcaggaattcatggctacgaatatcctcctatcattgctgttcaggaaatgataaaagaaattgatccccaaaaactaaaaggaacactaatcatcgtcccaatagccaatgttgaaggatttcaaaaacgtaccccattcatcaaccctttagataataaaaatctaaacaatgcatttccgggatcagaagccggaacacccacggatcagatagctcatcttatcgccagagaaataatttcaaactcaaccatatttcttgatattcatgggggagatgcaaacgaagatctgctgccctttatctgctactataatcgaaaagacacccctgaaaacacaaagaaggcttatgatttatcacttcgttctcaaataagacacatagtttcttatccttacaacctttcaccttctgatcctgcaaaatacgcattcaagcaggcaacacagcagggaataactgcattaagcatagaagccggtaaactcggaactgtacagagagaaaatgtagaaatcataaaaagagcagtctacaatatgttagaatacacagggaattataaagaagaaaaaataaaaatccaaaaaagaaaaaacacaataattctggatcagcaggattacattaaagttccggaaagcggaattttttacagccacctcaaaagcggagacagagttcgaaaaaaacagcttttaggatacattaccgacgaatttggaaacaaaaagcagaacatattctcagactcggaaggaactattttatacaaagtgggaaccccgccagtaaataaaagggaaaccctcttctgcattggatattccgaaaaaaaatgaacagaaaattaataagattaaataaattctcagtaaaacatataaatgaataaaatatatacaatcataacattatccgcagcggcatttgctttttcacaaaagcctctcgataaagtagaacctgcattctggtggaaaggaatgaaaaatccggaacttcagattctggtgtacggaaaagatattgccaaaaatgaaatagagctttcagatggtgttcagattaaggacattcagaaagttgaaaatccgaactatgtttttgtcaccattaataccaatgaaattaacgctccgaaatttaacatcaatataaaaagcggaaagaaaaagttaggttcttacacgtatgaattaaagccgagaaatccaaattcagcaaacagagaatcatactcttccaaagacgtgatgtacctcatcatgcctgatcgtttcgcaaatggcgatgaaaaaaacgactccagccccaatttaaccgaaaaagcaaaccgaaatcttcctaacggcagacacggaggagattttcgtggaatcatcaacaacttagattatattcagaaccttggagcaacagcagtctggcttactccggttaatgaggacaacgaaaaagtatattcttaccacggatatgcacagaccgatttatacaaaatcgatcagcgttacggaaccaacgaagaatacaaagagctttctcagaaattaaatcaaagaaaaatgaaactcgtgatggattatgtaaccaatcattggggagtttcgcactggatgatcaaagatctgcctacaaaagactggattcactggttcagcgatggcgaaaatggttttaaacgttccaactataaaacaaccactcagtttgatacaaatgcttccgagatagataaaaaattagctttagacggatggtttgatacgacaatgcccgatattaaccagaaaaatcctttggttctaaaatatttaacccagaatgcaatctggtggatcgaatatgccgaactgggaggctttcgcgtagatacctatccttacaacgacaaggaagcaatggcaaaatgggcaaaagccattacagatgaatatcctaatttcaatattgtaggagaagcatggctgtattccagcgcacatatcgcagcatggcaaaaagattctaaaatagcagaattagcaggctataattcaaaccttccttctgtaatggattttatgctgtattctgatctgccgaaagccttgaaagaaaaagacagttgggattccggaatggtaaaattatacaatgtgtttaccagcgatttcctgtacccgaatatcaataaccttttggtgttttttgaaaatcacgataccgaaagatttaacgaagttttcaatggaaatcctgcggaatataaacttgctatgaccttaatatcaacagttcgcggaattccacagctatattatggttctgaagtgggaatgcgcggcgacaaaaacaaagggggcgatgcagacatcagaagagattttccgggcggctggaaatcagataagatcaatgcttttaatccttcgtctcaaaatcctgagcaaaaagaattttatcagtttacaaagaaactcttgaactggagaaaaggtaaagaagtcattcatacaggaaaaacaaagaattttgttccgcagaacaatgtttttgtgtattttagatacaacgaaaaagaaagcgtaatggtcattttaaataataatgatgcggaacagacgatagacgtgaagcatttcgcagaatccctgaacggtttttcaaaagggaaagacatcatttccggcaaagaattttcggtaaaggacaattttaaaatccctgcaaaatcatcaatggttattgaattgaattaaaacacgaatagcacaaatattttcacaaattcacaataaaattattagtgtcattcgtgaaaaaattagtgtcgcttgtgtttaaaataaagttaaatatgaaaaaaacaacaatattctttacattcatcctatttgtattgagttttacatccatttctgctcagtcaaaattcggtaaggaaaaaacagaaatcggaaccatgctcgacggatttaatgtcgcggcagcaaaagcagatttcaacacttactttaattattttgccgacgaatctgtttttatcgggacagatgctacagaagtctgggacaaaaaagcctttatggtttgggctaaaccctatttcgataaaaagaaaacatggaattttacttccctgaaaagaaatatctatttcagcaaagacggaaaactggcttggtttgatgaactgttggatacccagatgaaaatctgccgcggttcaggagtagtggaaaaaatcaacggacagtggaaagtaaagcagtacgtactctctgtaaccgttccaaatgaagtggtagacaaagttgtcgctgaaaaagcatcgattgaagagatgttaatccaaaaactgaagaaataatggcagaaatgataagaaaagcagatgcaggaaaatttggaaaagtaaaaaagccgaatttatccatggctcagatcattaacatgagcatgggatttttaggaattcagatggcttttggtctgcagaacggaaatgcaagccggattttggcaaatttcggagccgatgttcacgaattatcatggttctggctcgttgcgccgataacaggattaatcgttcagcccatcatcggtcatatgggagacaatacatggagtcctttaggaagaagaaaaccttactttttaataggagctgttttatgcgccatcggattggtaatgcttcccaatgccgcttctgcaacacaaatgatggctgcaaacgttttactgatggcggttatttttctggccatgatggatgcttccattaatgtggcaatggaacccttccgtgctctggtgggagatatgcttccaaaacatcaggcgacgattggtttttctgttcagacaattttgataggaattggagcggtgattggttcagatttaccaaactggcttaccaaactgggaatttccaacgaagctcccaaaggatttgttgcagataatgtcatctattctttttacatcggagcagccgtacttataatatcaattttatatacaattattaccaccaaagaatattctcctgaagaatttgcttcatttgaaggtggaaaagaaatcgcagaagaaaaatccaaaatgtcggatattttcaaagattttgccaatgcaccctcccagatgaaaaaactgggaattgttcagtttttctcatggtttgcattatttaccatgtgggtttttacaaccagtgctttggcgacgcatcatttcgggctttccccggaagatacccattcagcggaatttaataaagccggagatttaacgggaagcctgttcggaagttataatctctacgccattttctttgcgtttgcattaacaccgattgccaaatttatcggtaaaaaacagactcatgcgctggctttggcaagtggaggtttcgggctgatttccatgtactttataaaagacataaattacctctggatttccatggtcggattaggttttgcatgggcaagtattctggcaatgccttatgcgatgcttattgactcaattccacaaaagaaaatgggcgtttacatgggaattttcaacttttttattgtaattcctcaaatcattaacggagttttcggaggaccaattgtaagcagaattttcggtaaaatggcaatagattatattgttgtgggcggaatctgtatggttttaggagctgttctcactcttcttttcgttaaatctgaacaagataccccaaaagaaattgaaaaagaaattcagcaggtgcatttctgataaaaagagaaatacttcagttgatttcctaaaattatccaagttcggaataaagattataaaaaacttgtttaaactaattatagaattaaccgcaaaaacaaaggataatgttaaagcgaatttccagaataatcaaagcgctcaaaagaataaaaatcaaagatttttaaaaaactatggtgagctttttcatttataatcaccaactttaaataaaaaaaattgtagatcttttgtgacttttgtggttaaataaattaaaatataaaaacaatagcttaactcattcacgttaaattaagaataatcaaaatttaaacactttttatcccgaattcaggttaaaatataactctaaatctaccggatccggtagatttttttattgatgacggcaaaaaatcagaaaaacttaaaaaatacgatcccgatacacagtctttaggcaaattttagacatcgtatttttatctcacgttaaaatttgaaattcagcagcttatggaatatttttattttaatgaatatcgtaaaaaagactgttttttatagatttttgataattttcgggcggaatttttatgaaaaagtaattgcgtatcaaaattagtttatacatttgtatcgttaaatacaagcaaaatgaataactcaattattattcttgtcatttttgtcattatcggattttcggtgatgggcaatggcttgtgataatttttgaaattgaaataatacagaccattctcatcacgagaatggttttttgtttaaagaccaacaccaaaataaaaattaaaacaatatagaatgtattacaatgacgacagtgttctcttctttgatggagaatatgtgaaagcaaaagaagcaaagaccgatttgtacggtcaatcattacactacggatatgcggtttttgaaggcattaaatcctacaaaacagccaatggaaccaaaatttttaaagtaaaagaacattacgacagactgagaaaatcagcagaggcgatgcatatgcctttccattattctactgaggaaatggtagagactacttataaattgttggaaattaataatctgagtaacgcttacatccgtcctttagttatctgctctcccaatatgtccctttcaaaaggacagaaaagctaccttgttattgaattatggaactgggataatggttatctggcaaacaaactgagaattatgacttcttcctttcagcgccccaatccgaaagcatttaaaatagaggctaaagtgagcggacattacgtaaattctattctggcaagtcaggaagcgaaagataaaggatttgatgaagcacttgttctggacgaaaatggaaatgtagcagaaagctccggtgcaaatgtattctatgaaaaagacggaaaactatatactcctcaaaaaggaaacatcttgcccggtattaccagagctacagtttttgaaatatgtaatcagttagggattccataccaagaaaaattgtttacgccacaagaaatgcagggcgcagatgccgcatttttctgtggaacagcagcagaaattgtcgctgtggaatctttgaatgatattcctttcagaatgaattgggaagacagtttatcagctaaaattcagcaggcttaccgtcatttggtcgtagaagaaaattattcatacctgaaattaaacctgcaaaatgtgtaatacagaactgaacaaatactccaaaacgcttacaaaagacccgactcagcccgcaactcaggcaatgttttacggtattggtttccagaaagaagacttcgacaaagcacagatcggaattgcaagcatgggttatgatggcaacacctgcaatatgcatctcaacagcctcgctgaaatcgtgaaaaaaggagtaaaagaacaggatttagtgggtttaatgtttcatacgataggaataagtgatgggatgaccaatggtacagacggaatgcgctattcccttgtaagccgtgatattattgcagactccatagaaactgtatgcgcaggacagtattacgacgggctcatcaccgttcccggatgcgacaaaaatatgcccggttccctcattgctatggcaagactgaaccgaccttccataatggtctatggcggaagtattgctcccggacattacaaaggtcaggatctgaacatcgtttctgcttttgaagctctgggaaataaaattgccggaaaaatttcagaagaagactttcagggagtcattcaaaactcctgtccgagtgcaggagcctgtggcggaatgtacaccgcaaataccatggcttctgctattgaagctctgggaatgagtcttccgtattcttcttcctatccggcgctcagtcgcgagaaaaaagaagaatgccaatttgcgggacattacatcagaattcttctcgaaaaagacatcaaaccttccgatatcatgaccccaaaagcctttgaaaatgctttgagactgattatgattttaggcggaagcaccaatgctgtactgcattttattgccattgcaaaatcaataggatacaatttgactttggatgattttcagcggatcagcgatgaaacaccgtttctggcagacctcaaacccagcgggaaatatctgatggaagacttacataaagtagggggagtgcctgctgtgatgaaataccttttggatctgggacttcttcacggcgattgtcttactgtaacaggaaaaaccattgcagaaaatctcgaacatgtcacctccattattgaaagagatcagcatattattcacgatatcagaaatcccatcaaagaaacaggacatatcagaatactatacggaaatcttgccgaaaaaggttccgtagccaaaatcacaggtaaagaaggaaactatttcagaggaacagccattgtatttgatggcgaaaaagaattcatcaaaggaattgaagacaaaaaaatcaaagaaggaaacgttgtcgttatcaaaaacgaaggtccgaaaggcgctcccggaatgcccgaaatgctgaagccaacttccgctttaatgggttccggcttaggaaaaaatgtagcactgataacagacggaagattctcaggaggaacccacggttttgttgtaggacacatcacaccggaagcatttgaaggaggactgatcggtcttatacaggacggagacctcatcgaactcgatgcagagaaaaataccatcaatgcattgctgtcggatgaagaaattgtaaaaagaaaagccgtttttcatcagcctgaatacaaagtgaaaagcggagttctttataaatatgccaaatctgtggcagatgcatcgcagggctgcgtaaccgacctgtaatcacaattaaaattgaaacatgatgaatacacttgaaataaatgaacagaaagatacccgaagtgcggaagccatcgaaatatccggttccaaagcagttttagaagccatattgcaggaaaatgtagacactgttttcggatatccaggaggagcaattatgcctatttatgatgctttatacgattattccgaaaaactgaaacacattctcgttcgtcacgaacagggcgcaattcatgcagcacagggatttgcaagagtatcaggaaaaacgggcgttgtctttgcaacaagtggtcccggagccaccaatctggtgacaggtcttgcagatgccatgatagacagtaatccgctggtttgcattacagggcaggtttatgcttccttgttgggaacagatgcatttcaggaaaccgatgttatcaatatcaccacaccggttaccaaatggaactatcaggttaccgatgccacagaaattcctgaagccattgccaaagcattttacattgcaaatacaggtcgtcccggtcctgttttaattgatattaccaaaaatgcacagcttcagttgttcgactatttaggctataaaaaatgtactcacatccgaagttatcgtcccgaacccgagatcagaaaagaatatattgaaaaagcagcacagctaattaatcaagccaaaaaaccattcgttcttttcggacagggagtgattctggggaaagcggaagaagaattaaaatcttttattgagaaaattaatcttccggcagcggctaccgtaatgggactgagcgcgttgcctacccatcataaattgcacgtaggaatgttgggaatgcatggaaattatgcccccaacgtaatgacgaatgaatgcgatgtattgatagctgtaggaatgcgttttgatgaccgcgttaccggacgcctcgataaatatgcaaaacaggcaaaagtaattcatcttgatattgatcccgcagaaattgataaaaatgtaaaaacagcagttcctgtttggggtgactgtaaaaaaacactccctttattgacagcacttctcgaagaaaacgaccattcagaatgggtggagaaattccgcgaactggaaaaagaagaaataaaagaagtcatgcataatgaactgaatcccactacagatgccatgacgatgggagaagttatcagagtattaaacgagcttaccaacggagaagccattatcacaacagatgtcggtcagcatcagatggttgcttgtcgatacgcccggtataaccattcaaaatccagtgtcacttcaggaggattgggaacaatgggatttggtttaccggctgctatcggagcttggtatggcactcccgaaaaaacagttgtagcgatcatcggagatggcggatttcagatgacacttcaggagttgggaaccattatgcagtttggggcaaaagtgaaaattctcatcctcaataacgaatttttgggaatggtgagacaatggcagcaattattccacgacagacgttactccttcgtaaatattacaagccctgattttgtggcagttgccaaaggatattacattgaaggtgaaaaaatatccgaaagaaaagatttaaaagctgccctcgaaaaaatgctcagtcatgatggagcttaccttctggaagtgatggtaggaaaagaaaacaatgtatttccgatggtagcacagggaacctcagtttcggagatcagactaaaataaaaagaaaatggaaaaacaggaatttaccatcacattatacaccgaaaattcagtgggattaatcggcagaatatcgggaatcttctcacggagaaaaatcaacatcgagagtctgaatacctcaccttcagaagtagaaggcattcacagattcaccatcgttatccaggagaacgaagaagtagtgagaaaactttgccgacaattggaaaagcaaattgatgtaatgaaagcctattacaatacagacgatgaaattgtatggcaggaacaggcactttacaaagtacccgcagatgtggttaccgaaaaagtatatgtagagcggctgcttcggcagtatggcgcatcaaccgtagtcatccgtcaggattacatcgtttttgaaacagcaggacatcgtgaagaaatagacagattaaccgaagaacttaacaaatacggtcttatagaattcgttcgcggtgccagaatcgccatcattaaaaacagtgcgggaatccaccaaaaagtacttcagtttgaaaaccgtgaaccctctccgcatattgtagagaacgaatacctcgataagcgggatgatgtttttaccatgtaacaaatcagtcaaaacaatcaaactccgaattaaattgaatacaatgttttattgtttcaaaaaatattcaaaacaaaacctaaaataaaaatattaatcctgaaaagtatttacagtaaacattttacttaatactttttacattttacccaaaaatatggcaaattacttcaataccttatcactaagagaaaaattgcatcagctcggacaggcagaatttatggacagtacacaattttccgatggtgtagcagctttaaaaggaaaaaaaatagtaatagtcggatgtggcgctcagggacttaatcaggggcttaacttaagagacagcggactcgatgtttcctacgccctcagaaaagaagccatcgacgaaaaaagagactcatggaaaaatgccacagaaaacggctttcacgtaggaacatatcaggaactcattcctacggcagatttagtcatcaatttaacccccgataaacagcatacttccgtcatcaacaccgtacagccactcatgaaagaaggcgctacattgtcctattcccacggattcaatatcgtggaagaaggaatgcagatccgtaaagacctcaccgtaattatggttgccccgaaatgccccggttccgaagtccgtgcagaataccttcgaggttttggagtacccacacttattgccgtacatcccgaaaatgatcctcagggaaaaggatgggcagaagcaaaagcctattgtgtggcaactggcggacacaaagcaggagtattaaaatcatcctttgtggcagaagtaaaatcagatttaatgggtgaacaaaccattttatgcggacttttacaaaccggctccattctttcctttgataaaatggtagaaaaaggcattgatgcaggatatgcttccaagctcgttcagtacggtgttgaggtgatcacagaagcactgaaacacggcggtgtgagcggaatgttagaccgactttccaatcctgcaaaaatcaaagcatttgaactttccgaagaattgaaacacatcatgcggccgcttttccagaaacatcaggatgatattatctcaggagaattctccaaaaccatgatgcaggactgggaaaatggagatgccaaccttttgaaatggcgtgcggaaaccggcgaaacagcctttgaaaaaactccggcgggagacgtaaaaatctccgaacaggaatatttcgatcattatctcctcatgtccgcattcataagagcgggcgtagaactcgctttcgaaaccatggtggaagcaggaataaaaccggaatctgcctattacgaatccctgcacgaagctcccctcattgccaataccatcgcaagaaaaaaactattcgagatgaaccgcgtgatttccgacaccgcagaatatggctgctacctcttcgatcaggcttgtaaaccccttctggcagacttcatgaaaaaagtagatacagacctcgcaggaaaaaacttcaacgaaggaaaagacgcgtccgtagacaatgcgcaattggttcacgttaacgacaccctcagaaaccatccggtagaaacggtcggcagaaaacttcgtcaggcaatgacggcaatgaaatccataaaaaccgtataaaattttttgggcagctatttccgccctccgttcccgcttttttcttttctagaaaaagaaaaagagctccactcaggtcgggctgcgatatattccgctttcaggaaataaagaccataaaaaaccggtaaaataaatgaagatgaataaaacactcacacttcccacactcaaatccgtaatacaggcaagaaaaagcatcgaaaacgtggtgaattacacccctttgcaatacaacgcccgtttgtcggaaaaatttgatgcgcatatttaccttaaaagagaagacttacagcccgtaagatcctacaaattaagaggcgcttatcacaaaataaaaacccttttcagcgaaggcagaacttcagaaggaatagtttgtgcaagtgcaggaaatcatgctcagggagttgctttttcatgcaagcagctccagattaagggaaccattttcatgcccgtaaccacaccaaaacaaaagctggagcaggtagaaatgtttggcggtcattttgtaaacattaaactcttcggagacacctttgatgcatccaaaaaagccgctttggattttgcagaaacttccggtgctgcctttattcatccttttgatgacgttcagatcattgaaggacaggcaacagtagcactcgaaattttagaacagaaaaaagaagcaacagactttgtttttattccgattggcggaggaggactcgcttcgggaatttccaccgtatttaaacaactttccgcagaaacccaactcataggcgtagaaccgaaaggagcgccctccatgaaaacatccatagaaaacaaaatcaataccgaacttactgaaatagacagctttgtagacggagcagcggttaaaaaagtaggagatttaacatttgaaatttgcagaaatacactttccggatgcatttccgtagacgagggaaaaatttgtgaaaccattcttcagctttacaataaagacgctatcgtactggaaccggcgggagcattatcaatttctgcattggagcagtataaaacgcagattagaggaaaaaatgtagtgtgcatcgtcagcggaagcaataacgatattaccagaatggaggaaattaaagaacgcgctttgctctacaatggtcttaagcactactttatggtgaaatttccgcagcgtcccggtgctcttaaagattttgtcctcaatgtattggggacaaacgatgatatcacccattttgaatacaccaagaaaaactccagagaaacagctttggcaattgtcggaatcgagctttccgatccatcagacttcgaaggactcagacagagaatgcagaatctggattattttgaatcgtatctcaatgaaaaccccgatattctcaatatgcttgtgtaatatcaaaaacaaacagtaaatccgctgaaaaggcggattttgtcgttcttatcttacatcaacagtttagccgtttatctcctgtacatttgtatcataaaataaaaacattatgaaaacagtatatcataaagcagacacaagaggtcacgccaatcatggatggttaaactcttaccacacattcagttttgccaattaccaaaaccctgaaagaacacacttcggagtgttgagagtattgaatgacgataccgttacgcagggaatgggattcggaacgcaccctcacagagacatggaaattatttccattccgttggaaggagatctggaacataaagattctatgggaactacagcagtcattaaaaaaggagaaattcaggtaatgagtgccggaaccggagtaatgcacagcgaatacaacaaaaataaagatcaggcggtaaaattcttacagatctgggtattcccgagagaagtaggagtagaaccaagatacgatcagcaaagcattaaagaaggtgaaaaaataaacggcttccagcagatcttatctccagacaaaaacgacgacggcgtttggattcatcaggatgcatggttcaatcttgccaattttaccaaaggaaacggcaaaaactacacgctgaacaaaaaaggaaacggagtctatgcttttgtactgaaaggaagcgcaaaaatcggagaccgtattttaaatgaaagagacggcttaggaatctgggatactcaaagtttcaacattgaagccgtagaagacgcagaaatattattaatggaagttccaatggaattaccttcatatctcaaataaacccttaattttgcaccacgaaaattccccgcctttggaggggtggcaaaaattcagaatgaatttttgacggggtggttaaaaaaaataaaatacataaaaatagaacaatgaaagttttagcaatagcaggaagcaattccgatacatcaattaataaaatgctagttacttacgcagcttcattaattccgaatgcagaattagaaatcgtagacatgaacgcttttgaaatgcctatctacaaacaccagcgtgaagtggaaagcggagttccgcaggaagcaaaagactttgcctcaaaaatcgacggagcagatgttttactggtttctctggcagaacataacggaacctactcttcagcatttaaaaatgtattcgactggacatcaagaattaaagacagagcagtatggaacgagaaaccaatgctgctaatggcgacagctcccggggcaagaggaggtttaggtgttttggaagcttcaggaaaacgtttccctcttcatggcggaaatattgtagacaccttcacactgcctttctttaatgataattttgataaggcggctcagaaaatttctaacgaagagaaagacagcgaattaaaagagaaaattcagaaaatttctgccttagaatctattcttgaaaaatagatttgaaaattaatataaaattaatatctttgcaaaaaggaaaaaagatgaaaattcagaccacttttaaagaatgtttctccaagaaagggaatattgtggactctgaaattctgagataaaacaacggccgataatctaccaagattgtcggcttttttgttttctgaatttgaataaaaagtaaaaataaaatgtaccaattcagtaatgcacgaatttaccagttcaaaacattgttacattgctaaactgatacattgttagattattaaaatactatgagcaacacgtacaaatcagcaggagtagacaaagaagaaggatacaaaaccgttgacaagatcaagaaagcggtcggcgaaacacataattccaatgtgttgaaccatttgggaagttttggggcattctatgagatcggaggatacaaaaatcctgtattggtttccggaacagacggagtaggaacaaagctgaaagtcgctttagactcaaaaaaatacgattctatcggggtagactgcttcgcaatgtgtgccaacgatattctttgtcacggggcaaaaccattatttttccttgattatctggcttgtggaaaattagactccgaaattgccgctgaaatcgttttaggaatggtagaagcctgcaaagacaataactgtgcattaannnnnnnnnnnnnnnnnnnnnnnnnnnnnnnnnnnnnnnnnnnnnnnnnnnnnnnnnnnnnnnnnnnnnnnnnnnnnnnnnnnnnnnnnnnnnnnnnnnnaattattgcgttgccaagttcaggatttcattccaacggattctctctggtaagaaaagtgttcccggatttcaacgaagaattcgaaggaaagcctttgtacgaaacgcttttggttccaacaagactatattataaagatattcataaaattcttgaagaagtagaagtttcagggatcgcgcatatcacaggaggtggtttgtacgaaaatattccaagaattattggcgacggactttgcgcatcgattgatgcttcaaaaatccagattccaaacattatgttagaattggaaaaaagaggaggagttgcgcgcgaagaaatgttcggaacattcaacatgggagtcggaatgatcgttgtagtggatgcacaacacgccgaaaaagtattgcatcttttagacgatgcttacgaaatcggagaaattacagaaggaagcgaaaaaatcaacttgaaaattaccaattagataatgtattccattttcaaaattaactaattttcaaattgactaatcatgaagaatcttgtcatactcgtttcaggttcaggaaccaatcttcagagaatcatcgataccattgataatggagaaatccggaatgcaaaagtatccttagtgattgccgacagagaatgttacggactggaaagagcgaaaaatcataacatagaaaacattctgattccgagagggaaaaacttcagtaatgaactggctgaaaaaattcctcaaaatacagacttaatcgttttagcaggatttttatccattctgaaacctgaattctgtgaaaaatggaacggaaaaataatcaatattcatccggctttacttccgaaattcggaggaaaaggaatgtggggacatcatgttcacaacgccgtgatcgaagcaaaagaaaaagaaagcggagcaaccgtacactttgtaacttcaggaatcgatgaaggagaagccatccttcagaaatcattcgaaattacagaagacgatactcccgaaagcgtagcggaaaaagttcacttaatagaatatgaaattttcccaattgcgataaacaaagtattaaataataattagacattaattattagcgatacaaaaaattcccctcatttggaggggtggcaaaaattcaaagaatttttgacggggtggttaaaaaactaacaacaatgaaaggcttcgacaagctcagcctgacaacgcaaaatctagccactcagtttgtcattccgtaggaatctaagcttagttgagatgctttcagcatgacaaacagaacggaaaaatagttagtattagagatgcagcgttgagccaagagtttatcctaagcttatcgaaggaaataaatcatctctttaatgaaaaacacatttagattttattatttcgaaaaacaggaaaaatctaagtaaaaataaaaagaccggaggtgaaagaaccggtctacagtttgaaatagctgtaaaaagtaaaaaatcgaaagtaaaatgagcaaaaaaagagttttaatcagtgtttctgacaaaagcggattaaccgaattcgcgcagtttttggaagcccaaaattatgaattgatttctacaggagggacgttcaaacatttgaaagacgctggtttaaatccgattcagattgatgaggttaccaatttcccggaaatgttggatggaagagtgaaaacattacacccgaaagttcacggtggtttgttggcggttcgttccaacgaagaacacatgaataccgttcaggaacacggaattggactgattgacatggtaattgtgaatctttatcctttcttcgaaaatgtaaacaaaaacatttctcttcacgaaaaggtagaattcatcgacatcggaggaccttcaatgctacgttctgcagcgaaaaacttcgattcggttacggtaatcacggatgttgaagattacgcaaccgtaaaaatcgaaatggaacaaaacggtgatacgtacatcgaaacccgtaaaaaactcgcaggaaaagtattcaaccttacttcagcttatgatgcagcgatttcaagaatgcttttagaagaagaatatccaacctatcttaatgcttcttacaaaaaagtttctgacttaagatatggagaaaacccgcatcagacagcagcttactacgtttctactttcgaaaacggagcgatgaaagatttcgaacagttgggaggtaaagaattgtctttcaacaaccttcgggatatggatctttgctggaaagtagtgaccgagttcaaagaagaaatggcttgttgtgcggtaaagcactctacaccttgcggagtggcgatcggaacttcagctctggaaacctatcagaaaactttcgaatgcgatccggtttccatctttggcggaattgttgctatgaactacaaaatcgacgcggcaaccgcagaagaattaaacaaaaccttccttgaaattgtaatggctccggaatttgatgaagaagcacttgaaattttaagaaagaaaaagaacttaagaattataaaaattgtcaatccggtttcagacaaacagacttgggtgaaaatcgacggaggaatccttgttcaggacaacgacagcatcttttcggatgacatcaaagttgtcacagaaacacagcccacagaagagcagaaaaaagcattattattctctcagagagtggtaaaatatgtaaaatccaatgcgattgtcgtttccaacggaattcaggctttcggaatcggaggaggacaggtaaacagaatctgggcaactcaacaggcgatcgaaagagccaaagaaaaattctccggcgacttagtattggcttctgatgcatttttcccgttccgtgacgtagtagatttctgcgctcaggaaggaattacagcaatcatccagccgggaggaagtgtaaaagatcaggacagtatagatgccgccaatgaacacaaaatcccgatgatgtttaccggaattagacattttttacattaattaaaattaaattaaaattatagatgaaaatctgtaatttaggatagattgctttccggtctttgctgagtgttaacgcctttgcgaacttaaaaagcagtcagttattaaagatatcttagcggactttgcgttaaaaatttttattgagattaaatgcatacatccggaaattatattttgagattgtatttatagcatccaaaattatatatttgtaaattatagactagttaattaaataaagtatgagaatattaatcataggtgaaggtggaagagaatctgctttggcagcaaaacttcagaatgacccaagaatttctaaaatgttttttgccaacggaaacgctaccactgatgttattggaaaaaatgttcatttatcagagattaaagaacttagagattttgccatcaaagaaaaggtagacttaacgattgttggtcccgaagctccgcttgtagcaggtttgaaggacgaattcaaaaaacacgaccttaaagtttttggtccgaatcagaaagttgcaagtttggaaggaagtaaggctttctctaagaaattcatgcagacctatgatatcaaaacggcaaaagcggtagtattcgattcctataatgaagctaaagaatatgtgcagacacagcaatatccattggttgttaaagcaagtggtttagcaggcggaaaaggagtggtaatctgcgatactttggaagaagctgaagcaacgattcatgattttatgatcagaagaatctacggagatgcaggaatccgtttggtaatcgaagaatatttagaaggatttgaagcctctatcatcgcattctcaaacggggaaaaattattcccttgtattgcggcgaaagattataaaaaagccggaaatggcgatacaggacccaatacaggaggtatgggaaccgtagctccaagcccggaatttactcaggaacactacgcagatttcgaaaaaaatatcttagaacctaccattaaaggtcttaaaggagaagggttcagcttcaaaggaatcattttcttcggattaatggtaacgaaaaacggaacttatcttttagaatacaacatgagattcggagatcctgaaacgcaggttttaatggctttgatggaaaacaatcttctggatgttattcaggattgtatggacggaaaagacatcgagcttaaatttaaagacgaaaaagcagtttgccttgtgatgtgttcaggaggttacccaagaaacatcgaaaccggtttcgaaatcgtgggcgaagataaactgaaatacagcaaacttttatacgcaggagccatcagaaaaggagataaagtagtttctaacggtggaagagtactgaacatcgtggctacaggagcaacgtatgaagatgcccgcaaaaaagtgtatgaagatgcaagtcatgtacatttcgattacggcttctacagagaagacatcggaaaattttaaaataatgccctgatttttcggggctttttttgttagaagctatgtcccgctttccgctgtatcttttttgtcattgcgaacaaagtgaagcaatctgtgaaacttctcagcaatcgcaataacaaaaaaggatgccgctgcaatcggggctataatttcagacaattttataaaatcatttatcaatcattattcatcaattataaaaaatgaacaacggtattatcatattagatttcggctcacagtacaaccagcttatcggaagaagaatccgtgagatgggcgtatattctgaaattctaccattcaatacacctttagaaaccattttagaaaaacagccaagaggaattatcctttccggcggaccaagttctgtgaatgcagaaaatgcccatttggttgaaaaagaatcatatgaacagggaattcctgttctgggaatttgctacggaatgcagttaaccgcacaccttttaggcggaaaagttcataaaggcgtaaaaggtgagtacggaaaagcacaccttgaaattataaaagaatcgtctttattaaaaggcgttaccaacaattctatagtttggatgagccatttcgacgaagtgggagaattgcctgaaggatttgagctgaatgcaaaatccggcgtaattgcttccatctctaatgaagataaaaaaatctactgtgtacagttccacccggaagtttcccacaccgaagaaggaggaaaaatgctggaaaatttcgttttcggaatctgtaatgcagagaaaaactggaaactaaccaattatatcgaaaaaaccgttgcagaaatccgtgagaaagtcggagatcagaaagtaattcttggactttcaggaggagtagattcttctgtagcggcagtgttaattcaccgtgccattggcgaccagttgacttgtattttcgtagacacaggtttattgagaaaagacgaaggtaaaaaagtaatggacaattatggagagcatttccatatgaacattaaattagtggatgcttccgaaagatttttatcaaaattagccggagtagatgatcctgaagccaaaagaaaaatcattggaaacgagtttattcacgtttttgatgaagaatctcataaaattgaaggcgctaaattcttagcacagggaacaatttatcccgatgtaattgaaagtcagtcggtaaacggtccttcagcggtaattaaatcgcaccataacgttggcggacttcctgaagatatggaattcgaattgcttgagcctctgagagaattattcaaagatgaagtaagaaaagtgggcgaagaattgggaattcctcatcatctggttcacagacatcctttcccgggtcctggattgggaatcagggttttaggagcagttgatgcagaaaaagtaagaattttgcaggaagcagatgatattttcattgaagaattatacaaaaacgatttgtatgaaaaagtttctcaggctttcgtggtgcttcttcctgtaaaatctgtaggagtaatgggcgatgaaagaacatacgaatatacagcagttgttcgttccgcaaacaccatcgacttcatgaccgcaacatggagcagacttccttacgagtttttagataccgtttcaagcagaatcatcaacgaagtaagaggaatcaacagagtagcttatgatatttcaagcaaaccacctgcaactattgagtgggaataatcttgaataaaattttaaatataaatcctgccttttggcgggattttttgtctaccaatcctgtctcaggaaaattaataggcttaaaagataaatcaggataagaaaaacaattccattgaagatataaagtaaaattttccgatgatgctgatgaataatgtaaaagttaataattagaattagtaaaataacgggaataaattcaaggaaaaactcaatttgaatatatattgataaaatcagatagatccatgatatcaataaaataattacagaaatagttttcattagtttaatttttcaaatataaaatcagaaaaaattttagagtaatcttcactgaaaaagaacattctgcttattccatcatatctagctattacaaacttgatgtacttgtaagattgtttttgtattaaataaaagtcatttaaaaatctgctttgtattttttttggtattttcgtttttcgcaatatgatttctaagttcgtataaactaatcagctcatttataggcaatagatgatcggtaaatgaaatatcaaaatttttcatctttgaatcatacttttggattttgctataaattaattccttcatttttttaatactaacttttttcactaaatttaagtaaaattacatcaaatgcaaatagaaacacgaccactgacggtacaggattacgatgaattagtaataacaatgaaacgtgcatatccgcaaatgtccgagtcaatctggtctaaaaaaagtatagaaaaactcacaagaatatttccaaaaggacagatctgcattacagtggatggtaaattagctgcggtggcgctttccattgttgtaaattataatgaatttggtgatgatcatacatacagtgatatcacaggaaattataccttcaacacccattccgagacaggcgatgttttgtacggaattgaagtctttgtagatcccgaataccgcgaactccgtttaggcagaagattgtacgatgcaagaaaagaactttgtgaacttctgaatctgaaatcgatcgttttaggagggagaattcccaattaccataaacacagtgatctgtcaccaagagaatacatcagaagagtaagagataaagaaatttatgatccggttctgtcttttcagttgtccaataactttttacccatcagagttttaaaaaaatatcttccggaagacgaatcgtccaaagaaaacgcagttttgcttcaatggaacaatatttattacagtaaaaaaccaaacaccatgcaggacagcatcattcgcttgggattggttcaatggcagatgagacattttaaagatgtgaatgctttttatgagcaggttgagttctttgttaacgtaatgggcgattataagtcggattttgtattatttcctgaactattcaatacccctttgttggctccattcaacaaactttctgaaagagacagtatgattgaactggcgaaattaaccgaagagatcaagatgaaaatctcagatttggcgatcagttataatgtcaatatcatttccggaagtatgccggttttcgaaaataatgatctctacaatgtaagttatcttcttcacagagacggtagagtagatgaatacaggaaaattcatatcacacccaacgagaaaaaatattacggaatgaaaggcggaaacgaaatccgggttttcgataccgactgcggaaaaataggtctggtaatttgctacgatgttgaatttccggagcttccgagaattttagccgatcagggaatgaaaattctatttgtaccttatcttacagacacccaaaatgcgtatatgagagttcgtcattgcgcggcagcgagagcaattgagaacgaatgttacgtcgcgattgcaggttgcgtaggaaaccttcccggagtcaataatatggatattcagtttggtcaggctgcggtttttaccccttcggattttgcgtttccatccaatgcggtgaaaggagaagctaccccgaatacggaaatgactttaattgtagacgtcgacctcaatttattgaaagatcttcaccatcacggttcagttcaggtcatgaaagatcggagaaaagatttatacgaaacctatcttaaataaaaaaatgggatgctttacagcatcccgttttaaattttagttcggacataaaacagccagacagatcaatcccggacatcttggtcttccgtcatccggacagcatttgttcgagcagtttctgactaatccgccacctgcgatacttttcatttcttctcttgaaactttttttaaatttttcattttaataatttttagagttggttttaatattttgttacggtaaagttaaagaaaaaaaatataatatattcatttagagctttttcccgctatccactgtatcttttttgttacggcttcctgaactacgttcgtaaacctccggtttatgctccagccgcaacaaaaaaggatgtcgttactatcggggctatggttgaaagttgcttcattaacattaggaaataaccacagagtttgtcaatccttagaaatctgagcgcaaatctttcagttttatatttctaatactaagttcaggttcatgcagaaaaacaaactatattgaaaagattgaacagttttattatcgtttcctgaatgaaatcgaaaattcgaagtagccaaacaccattgcgaacgaaaaaaattttcaacctttttaaataaaatcctcgcgatctttgttttaggaaatagattcttcaatctgctacgtttctttctaacatattcaaaatttgcgataagaaaaaacttgcattacactgctatcatttgctgagtgtaacgccattgcgaacgaaaaaaattttcaaccttttttaaataaaatcttcgcgatctttgttttaggaaatagattctttaatgcattgcgcttcgatcagaacaaaccgaaagggaaaattataaaaaagcgatttaaaatagaaaattaattattatcaataggaacaatttttgaattaaattgcaactacatttcagactatgttcgataaacagcaaagaaaattaaaaagatctgcccggttaatttccgtgttaagcaaatacggcttcaaagatctgttggcaagaatgaacggcggaaataaagatgaaattcccgccaattccgatgaagttgtatcaaaaggaactgtttacgagagaatccggctcgttttggaagaactaggaccaacttttgtgaagctcggacagtctttcagcaacagggaagatcttcttccgccggaacttcttcaggaactgcagaagcttcaggacaaagtggaaacggttgaaatgaacgtggaagaaatactggaaaacgaattcagtatttcggtgaaagatcattttgcggatattcagaatattcctctcgcaacagcatccattgctcaggtttataaagcaacattaatagatggtacgaaaattattctgaaaattaaaaaagcagaggttcagtctgtgattgaagacgatctgctgcttatcaaagatctggaaaaattggtctcttcttattccgaaataggagagaaactcaatctgaaacaggcgatttccacctttgaaagatctttgctcgaagaagtttccctgattaatgaaaaggaaaacatcctgcagttcagaagaaattttaaaaacagcaaagaaacctacgttccgaaggtttatgaagaattttccaacaataatgttctttgtatggaatttattgatgggattaaagtaacggatactgcatctcttttacaatacgatattgatcctgtaaacatttccgaaacaggcctccgactttttgtttcccagattttagactatggttttttccatgcagatcctcacgcaggaaatattttggtgaaaaaagacggaaaagtagtttttatagatttcggtgcggtcggaaaaattccgccgaatgataaagaagtccttgaaaatcttattgtaagttttgttgccaaaaatccgcataaaattgtccgctacctgaaaaaaatggcaatcagttatgaaattccggatgaaagaagatttgaaaatgatgtggaagatattctgaatttcgttcacagcacctctctgaaagaaattaatgcacaggttatcatcaataaaatgaaagatgtattgaaagataaccgtcttcatatgccggattacttttatcttttgttcaaaggaataagtcttatcgaaggagtgggaagaaccataaatccggatctggatgttgtaaaaagccttcatccttacaccaaaaaaatatttaccaaaaaaataagcccgaaaaatattgtaaaaacaggaatggacagaatgctcatgtttacagataatgtagacgaaattcccaaagaactgcgttctgttttacagaaattagatgaaaataaattcaccgtttccagcgaaatcaaaaatatagaaaagacgaatcaactgataaaatcaagcatcattaatcttattctggcaatggttttaggcgcaaatatcatcgcaacggctattgtattttcttcagaatcgggacccagaataggagaattgtctttggtggcagttttaggatttatcttttcaatatttctggtaattgttattttactgagggttacgagaaagtaaaactttcagttctaaatcaaaatcctgcaagtgcagtatttagtctgcacttacaggataatatgattttaataatttaaattttgaaattagttatagactctgaattcgaatgatccggcttctccgtaaacatcgtagtttgatccgtaagaatctacaatatctacgtaaatagtatcattatctattctaccgcttaagcaaaatctctgatcttttcctacagttttttggtttattacacttaccgaccaaatttttccggaaggaaaggctccgtttaaagtaccgataaattctcctgtgcctttcttgctccacacaatatctccaacggtattttcaaacacggtgaattttggctgtgctgtagattcatcaaataccaaagatcctgaataaattttgtatggcttaacctcttgtaaatgctttctctgaacaaaatctgtatcactattggcaggaaatacattaattcctgaaatacctgttctacggtctattttagcaatatttgaaagatatacagagctgatgtttgaattaccaatcgttgcagtattgtcaccgtttcctgttgttgctgcacctagtacaatttcattagttgatgtgtttcgatctttgaaaccacttctgttacctacaacaacactttgaaaaacatttttggagtttccggttgcctcacctatgaaaatacttttctgtgcttcttctacgtttatccctgcctgggttccaatagcgatcaattcgttccatatattaatatcatagaaatttcctttgaaactttgtagtgcataacagcctagtataactgatgatcttaaatttaaagaattttgagcgatatcctgaccaacggctactattctgtcaacaatattacttgcatttttgaagttgttgtgtccgagtatggtgttgattcttgattttcttatattttgaagattattattaccaaaaacaaatgttgttgcaatagagtttgcttttgataaggaattggtcccaaaaacagcattatcaatacctactgtatatttggacgcagaatttttaccgaaagcgatatgattgtcattgctgtttgctgttctcagctcaaatgttactccattgttaaaatctctgacttcataaatggacaattgattttcattatttttaatatgttgtaaggaaacaattatctctccggtaatatttgttccttctaaagagatatcgaaaaaattattgatattatccgttatttcagttaaatggtagtttactacccatgagtcatcatttccgctgtcaaatataaaaccagttttgtatccccatgtcccggtattaccaatatttgagttgatgctaaacaggtaagattctcctggagttaaaccttcaaaaagtctgtaatttccggcgggagagtttttcaggattaacttttttgtttttacatcatatgatgcattggaatttggcggtgaagaaactaaagaaagatttacattctcagcaggaactttattcaattcgtcttgaatatgattaatagattttccctgaattccaaaatatttttctttaaaattcccttctactaaaggtctgtaattgaagtctgggcttccgtttccgtgatgctcgtgagaaccgattaacaggttgtgacttgcaggatgtcttttcggatctttataaaatccaaagcctaacattacatcattgtctaaataggagtcatgcgtttcgtcgggatattttccacttgcatcgtaaatatttcctcccatcaccagcgagttaaatatataacggtaatttcttacattatatcctgtaactacagaactatgtatatcgcctgcccagattagatttccgatagtgacgttattagtcatcatttgccttaaattaaaaccattggaggctattgcggttctgttttggttgccataaattcctttagcattagcaatattgttaccaaaggctgttattgaatcgccaatcggaatatcattcagctcatacaatgcagtaccgaataaactgtagtttgttccatcaacaaaacctttccctagttttgaaccgtaggcaattaatgaatcatgcgcagggtgttcaggtctgtactctgtatttcctttaaaatcagaaagaatatcggttccctgtaaaatgtatcttgaagaatataatttttcgctctcatctttgccaatataattcggtaagacattccatcctgcaataaaagcatcatacattgttttgttttcatgatctttgttgtttgtaataacccttctgctagagtttgttgtatactgcaaataatgatcgttgatgtattgttttgaatagacatttcctgttaatccactttcagaattgtctattgtggcaatatttgaaggtaactgattaacatttaatttacttttccaattttggatgttctcactgctcaaattggaagcgtctaatttggctaaactgttttcatgagcattagaagaattaaggtgattattaaacgcttctaaacttgttgtttgatgaaaaagtgcagaaagtccttcaattgatgaaagcggaatagattcgcttttgtgaaaaaaagaagaccaggatgctgcaaattcctcttccgtaggtgtttttcctgtctgaaaccaatatagaattgtatttaaaggtgttgccatttttttaatattttgttagtatttggttgatagattttaatttgtgataatattagtaagtgattttaaatttcgggaacatgtaatcgtcctttcggatctcaggataataattttgttcatcagataaatcgatcttataatttgatttcgaatagaaatcttttgctgttttttgacaattggcgagaatttcagcaatttcttgtaacttagtttttaatatttccatatttttggttgatttaaaaaagcaaatataaacgatttatttcgtataaaaaaataaatatgcatcaaatttcgcctataaaaaataaaattttacaatatattgaatataagggtattagtaaatataaattttatcaggaaagtggtattacaagaggtgttctggataaagaaagcggaataagtgaagataatatagcgaaatttatcgcttatgcgccggaagttgatctgtcatggctttttttagatcagggaaaaatgcttaaaaataaagaaatcgaaaaaacgtttgaaattggtgattttaaagatgataaaaaagtccagcctgaaatgggagacatttccggagataagcattatgataaagtttttagtaagctgaaatttgatgatgaaataaagattgttgaaaacggaattcctttttacagcttgccggtaagcgcaggaaagcttaatgaactgctggaattaacagaaacacctaccggatatatcaatttgcccggagttcactgcgatgcattttttcctattgttggcgcttcatttgagccttatattaaagcgggagatataataggaattaattttatagataaatgggaaaatctcgatccggattgtatttatctaattatcacttatgatcagagaatgatcaaaagattaatgcaccatcctgatgacagtacattgttaatctgtatctctccgaattataaagaatttacgatagacaaattcacaattcggtatattcataaagtaacattttgtggaagagcaatttaatttatgaaaatgtagaaagtttaaatgctttaaatgtatttgcttacagagatagtgcagataaacagagataattggtaattctcaaaagtattattaaataatgaattgtatttacaaaaagcagcattttgagctctttaaacttacgttgtatcaaaggcggagcaatgaaatttcttgggctttatttctctccaatcccaaaatctttcatcagctcaaatccgtaatttcttaaagttgaaataatttctacagcttttttaccgcgttctgtaatgttgtattcggttcttggaggaacttccggaaatatttctttggaaataaagccgtcttccagcaattcttttaaactcttagaaagcatcctgtctgaaatatgaggaatgctgttagccaattccgagtaacgccatgctttatctttcagacgccagagaataggcattttataggttccgcctattttgctcatggcaaattcaacaggattgtgaaaaaggtgcttatccgatacaaaatcaggcatacttacatttttgttagtttcttacaaagatagccattattgattttcatttctactcataattatctttgtttcatcaaaattagaaattttaaaatcaaaaaaacaaaaaatggaaaaagtaaaagaagtaaacagctatgttcattttcacggagctcctgtaaaaggtaaaattctgatgattgcaagttcgccgagtgtgagtaaacaaaccaattggccaatcggtttctgggctgcagaacttacacatcctttaagagtttttcaggaagcaggttacgaagtggaactggcttcaacagaaggcggaaaactggaaatggacggctattccaatcctttggacgaaagcggttattctgcacatgatgtaatttctttagggtatatgcagaaaactgactttaacgagatgcttgaaaatacaagaaaactgactgaagttgatgcaaaaaactatgatgcggtttttctggttggcggacagggaccgatgtacactttcagaggaaataaagatttggaacaattatttgtgagtttctatgaaagcggaaagccaagcgcagcggtttgtcattcaacaactttattattggaagctaaaaaatcaaacggtgaattgcttgtaaaaggaaaaacctggaccggttttgcggatgctgaagaggagtttgcagatcaggcagtcggaatgaaaattcagccttacagaattgaagaagaagctaaaaaattacaggaaacaacatttaaagtagcagctccatttagttcgtatgctattcaggatggtaatttaattacaggacagcagcaaaattcaggggcagcagttgcagaactggttgtagaactattaaatagataatgaggtaaatttcacgttaaactaaaaatatgaatatagcaatcatcggctccggaaatgttggcggagctttggctcaacaatggataaaagcggggcatactgttttggtaggtgcacaatttcctttgagtgaaaaaaatatttcccttgcaacgaaaataggggaagatcgctttgccgtaatcgaaaatgcagtaaaacaatgtgatgtgattcttattgcaacacctccgactgccatttttgaagtaattgaacagttaggcgatgtatcgggaaaagtaattattgatgctaccaacgccgtaatgaagtctccggaaccttataaaacggtgtatcatgctttagcagataaaaccaatgcggaaatggtaaaatgttttaacaccacaggttttgaaaatatgcttgatccaatttataacaacgaaggaatcgatatgtttatggcaggagacagcgaaaaagcaaaagaaattgccaaaaaactggctttggattgtggtttcggttcctgtatagattttggaaaatctgataaagtagaacttttggaaaaatttgcactttcgtggatcaatctcgccattatgcagggttacggaagagatatggcttttaagattattagaaggtaatgtctgtaaataatttaagcatcaaagtttaggtttatttttctcaaaaattaattgtctatctttgcaaaatggaaaaactcacttttgcagattttgaccttccggttaaaattcttgatgttttagcggatcttaatttatttgaacctacccctattcaggaaaagagcttaaagccaatactttccgggcgtgatgtaatggggattgcgcagacgggaaccggaaaaacactggcgtatcttttaccggttcttaagacttggaaatacaataaatcgggaaatccaaccgttttggtgcttgttcctaccagagaactggtggtgcaggtttctgaaattgtagaaaagctgacggaaaatactactgcaagagtaatcggtatttacggaggaaaaaatatcaatacccagaaattattatttgataacggatgtgatattttgctaggaactcccggaagagtaatggatttggcaatcgataatgccatttctttaaaagaagtccagaagctgattattgatgagtttgacgaaatgctgaaccttggtttcagaccacagttgacgcatattttcgaaatgatgaaggaaaaaagacagaatattcttttttctgcaaccatgacggaatctgttgacgaaatgttggatgagtactttgcgagtccggttgaaatttcactggcaaaatccggaacgccgcttgaaaaaattgagcagactgcttacaaagtagagaatttcaataccaagatcaatctattggagcatttgctgaaaaccgataccgatatgtcgaaagtattgattttcacaaacaataaaagaaatgcagatcttttattcacaaaaattgatgagcttttccctgagcagtttgatgtgatccactccaataaatctcagaattacaggctaaaagcaatgaaaagctttgaaaatgaagagatcaaagggttgattacgacagatgttatggcgagaggtcttgatatttcagacattacccacgttatcaattttgaaacgccggatattcctgagcagtatattcacagaatcggtagaacgggtagagcggacaaagatggtaaagccataactttcgttaccaaaaaagaagaaactttagctcttgacatcgaattactgatggacaaggaactgaaatacattgatttcccagacggagtgaaaataaatcctaaaaagatttcttctgaagaggaaactgtgatcatgaagaatcctgtaaaggtaaaattaaatgaaggaggaggagcttttcacgaaaagaaagcgaaaaatactaaagaaaactggggcggaccttccaaaagaaaagcacctaaaaagtttggggcgaacagagcacagcagaaatcaatatctaaatccaaaagaaagaaataaaaaaactcccgaatttttcgggagtttgctttttatcgggttaaaaccagaactattttgtcatcgattccgtctccgtcttcatcactgtaatccgaaacaatatgcatttcattagtcgtaagcttcagaacttcactggattcgccgtctataacgatttgtttgttcagcgggtcataagaataagaagaagtatctgttcccagattttcacaatttccgctcattccctcatcaaaaatgttgcttaccattgtattgttcgatttaaaatcaaatgtactttttttgtagcagcttgaagaaggatcattgtaaatagtacttccgttttttccggaaactgccatttctctggaaggcttccagactcctacaacagatgcataaacatcgtcatcatcacttttgcaggctgtgaaaagaaaacctgctgaaatagcaagaaataagatttttttcatggtttaaactaatttttaaggctgcaaagaaaaggaaaaaaattattataccgaaaaattattaaaaaatttaccaataataatgtgtttcaggatgtttctctttttacttaaattcgatcttatttttatttaaaatctccttgaatttttcaagtttaccctcttcctgcatttttttatagatataacttatcatagtttctgcatctgttctgtaaggagatttttgattgtcataaattctaagagcttttgccatgtaatctaaagctttttcattttcttttaaagcattaaaatagatgttacccattccgtaatatacttccggatcttctggatacatcttatccagatctttataagcgtcaatagctttctgatattcctttttataaatataagcaataggaatattttgtaaagccatttttcctttaggatccacttccaatgattttttataagcttctagagctttgtcataatcgcctacttttctgtacgtaatacctaaattatcccaggcataagtaaattcaggatcaatttttacagcattttcataattctttatagtttctttccaatcctccttttttgacgctgaaattgccatattgtaaaattccaaagctttatcattttttgatagtttttcagacttactttctgcaatgtttatagcctttttcagacttgaacagtttttcatcaggcttctttcaatggagttatagttttctctatatttctcagaatccttattagtgtctaaattaagggttatattctttttagtatctgaatttttattcttttttgaagattcctccacttcagatagtaaaattccaagttgcagtgcaagtgtatttttatcgatacattcatgaatatctttaattatagattttttttctttatcaaaaagacttattgaatctacgcatttacaagtgttttcagagagttcatcgatcagcttttgttttgtagatttttcctgtgcagaaacagatatgcagaaaaacatcgaaattaaaatggttacttgtttttttatcatagttatagtgtttaaaaaattatttcatataaggattcatcacagaagtccataatctgtagccttccggcgtcatgtgaagcatatcttccacaaataggtcttttcttacgtttccgttttcatcctgcattacctttgtgatatcaataaaatctgcattcggttgttttttcatgaaatcggcaatcttttcattggctttcttcatttgcggccacagcttttcgcggctcggagaatatttgatggaaatataatctacttcaattttcgggaattttgcacggatttttttgtagaatgttttaaatctttccactacaacatcggctttcaatttgtcgttgtcagcaaaatcgttctcaccacagtaaatgatgatctgtttgggttgataaggatttaaaagatcctctgcataatcattaagatccgttaaccttgaacctccgaaacctctgttgatgatggttttatccggaaaataattcgcgacatctgtccatttggtaaaagacgaacttcctaccaaaagaattgcatttttagccggaggattttccagatccagtttcttaaaattttggatgtcctgccagaacatcggtttttcctgtgcaaaaaacagggcaaaagtcagcatcagaaatgccgaaaaaatcttcttcattgttttaataattttagttgaatattaaaattttcttttcaagaaaaaactcccgaatttttcgagagttttcttttttatcttttatacgttacgtattctgcatccggtatcgtatcgccgtcttgatctatattgccggacaattgctttattctcatttcagagcttgtaagaactacaattctgtacttcacagcactgtttccggtgtaggtaacggttaaatcctttgtttcagaattatactcatattttccttctacttttgccacaacattacagtttgtaccagttcctccatacgttgtaaaagaggtataataatctgttctgaactccagtttgtcattcacagaacatcctgtaggtgttgtagtaccgattacaaatttatcgtcttttcctgatatcgtttcttttttactgatcttccaatcacctttcatcatatccatttcataaccctggatatcatcatcgttacatgaagtaagtgctaacgctgaaaaggcaaataaaagtaattgttttttcatttttacaaatttaagaatatgctaaaatataaataaatttgaaatatctctaatgaaattaaggttttttaaacgattgattacagaaaaagcaaattggaacaaaaattgtaagaggaaagtttatttctgactgtattattttcatcagtacaggaataaactcccacctctaattctgagactttcggtctttaatagctcatttccacaattttagaagcatcttgaggagtcagttttttatattctcccagacctagccagtttctctcagtgaatgctttttccactctttcagccgttcctttataatcttccgtatattcagaaagcttcgtgtcaatattaaggctgtggaaaaactcttccagttttttgattcccagttccgctttttcttcaacagttccgtccttaattccccagactctttctgcatactgagccagtttacctttcttggtttcaaaattataacggtaatgagacggagcaataatggctaaagttcttgcgtgatcaatcccgaaataagccgtcagttcgtgtcccatcgcatgaacagcccagtctgtaatcacacctttctgaatcagtccgttaagagccattgtacagcaccacatgaaatttccggctgcgtcataatcaaattcctccgccagaactttcggagccgtttcctgtatactgatgagaatactttctgcaattctttcctgaagatctgccgaagaaggagccgtcatatactgttccagaacgtgagtataagcatccgttaaaccattaacgatctgtctttgcggaatcgatctcactacttccggatccagaaccgagaattgaggaaataatcccggacctcccgaagacaatttttcgttggtttctcttctcgaaatcacgtaccccgaattcatctcagacccggttgcaggaagcgtaagaacagttccgaaaggcattccttcgccttcaaaagttcttacaggtttcgtaaggatttcccacggttctccatcatagtttgctgctgcggaaagaaacttcgttccgtcgatcacagatccgcctccgacagccaagagaaaagtaatattattttctttgataaagcttaaagcattaattaatacttcatattcaggattggctggaatgcctccgaattcatgcacttcatgatcttttaaagcttcttttacctgatcgtaaacaccattgtttttgatgcttccgcctccgtaaatcattaaaattttggcatctgcaggaatttcttttgaaattttagcaatttcaccttttccgaaaagtattttggttggattttttagttcgaaattaagcattgttcttaaatttatttgaattcaaaattacgcaataccacataaaaacttagttaataaagttttaaaattttaatgattcctttttattaaaactattgaattttgatgaataatcatttaaaagatcacataagaagaaaatcaaagattttcatagactaatatgttctgatataaagcttaaaaattatttaaaatcttatgtgactaatgtgtctagtaaaattcttgcatttaatgtgtgacactgtcattttgagcgcaacgaagtggagtcgaaaatctcaaaaaacttcatatgaatagattcttcattgcaaattgcttcgcaaaataccattcagaatgacagaggaattcaaccacaaaagtcacaaaagatgatgataaatgcaaatttcagaataataaaagttctcaaaagaataaaaatcagagatttttaaaaactattgtgtgctttttctattatgattgttaactttaattaagcataaaaatcttttgtggcttttgtggttcaaaaattatatgtctttaatgtttaaaggttttattttcaataaattaatcattgaataagcctttgcgaaattccattcagaatgacagaggaatttaaccacaaaagtcacaaaagatgataataaagccaaatttcagaataataaaaggtctcaaaagaataaaaatcagagatttttaaaaactattgtgtactttttatattatgcttgttaactttaattaagcctaaaaatcttttgtggcttttgtggttaaaaaagtatgcgtatttaattttaaaagctgtcattctcaagagattattcattgcataatgctttgtaaaatttcattcagaatgaaaaaacaaaaaaactttaataagctccgttactttttacttctaattttcctgtttttctattgattttaatgaaaaaagattctttagtttcagaaccatttttagattttgaaagatacagtgaaatgtgctgatcttcaattttatatgcacttcctagttgattggaactgtcaaccgaatatccgaaagtattggtaattaaaatagcttccggaagattgtctacaaatccgataaaatctcttagctgctgttcgtttgaaaagtatttcgactggcttttttcacaggctaaaatgtaggaaaagcaattttcgccgatacatttctgaaaaaatcctttttcgggtgcaggatcattcaacgtcatcaaatccggcatctggctttcgtaaataatggctttatcgagatcgggattgtttctgagaacactccagtattcgtatttcttatccggaacgataaaagggtagagcagttctgtattatcaaggatttccggaatttttttgaagtctgaaggaacggttttctggctgaatatccaacctgagcaaagcagtaaaaccggaaataatactttcattcttttgtttttgcaaatgtagcgaacagaaatttactgaaaaataattttgtagtagccgttctcgtctttcacatcaattccaatgccagtaaaggtgagtttgttgatctgaaaaccatcgcagcctcctttaaattcagatgattgtatcgtaaaagtgaaatttttaatattggaagtaaaggtataatttttcgttccgttgtaagcacccacattttccagaataaccatatcatcattggttttcgtaagctgaatattggtctggttttcctccttcaccgaataattcgtaagcgttccgtctgttatcagattcacatcattggaatccacaaatttaaaagaaatcggctgtggcgcattgtagcaatcttcgccgcaggcggagaaaaggagaaggggaagtaggaataggagtacttttttcatgggattcagattggtgtgaaatgtaaaatttaattctgaattacaacaggaccaggtttataatttttcatttgattttctgtaccaattatctttacatttttatcaatatataaaatatgcattattagattttgatttttactaatatcaatttcacttatttcattgttatctatcgtaatttgttctaatttcagatttttagataagtctagttcttttaatttattattgtcaatagtcaaatattttaaatttttaaatgattttaaatcaattgctgtgatctggttattcatcatatttaatgactctatattgggacagttttgaatttttacatttttcaatttatttactccacaagcgaaatctgtaagacttggaagattggaaatttctagactttttagattatttctagcacaatataattttttaagatatttaaaatcatgtattttaagattttcaagtttatttatggttaaagaaagatattcaatatttttgaaaaaattaatatcatttacattttctaaatctttttccattagatcaagatctttcacattctctgcttctgttttttctattttcttgttattatttctatcaatttcaggatatttatctaaaataattttctctaaattaggattttcaaattttaattcttgagaatgcacaataataaaagaaataaaaaatagggcaaataaaatttttttcattgtatgttattttaattatacaaattagataaacaaatatttgttaaatataatatttatctatcatttgaaagttattattttacaagaatcccctacatttgttatatgatacacgaccaacgcgcagaaaaattcaggcagatcttggaaaataagttccagatctacaattcattgtttatgagcctgccttatgataaaatgacgaatatcgggatgctgcttccgttcctttgtgaagaaagcaaaatcggctacgaagccggaaaaacgcctgaagaaatcgttgaagaattctttaaaaatcataccgatctgcagactgaagaacagaagacagaactgcttttcaaaataatccaatatattgaaagacaggtggttttgtttgatagtattgaagatgctgcatttccgaacctgcattccgaaagtgataacggaacggtaaccaatatgtacgaacgttcgcttcaggatcataaactcgaaaaagtgcgtgaaaaactgaaagattttgccattaaaatcgtgtttacggcgcatccgacacagttttacccgaattctgtacagagaattcttcacgatctcagaaatgccattacaaccgattctatcacgaatatcgatatgcttttgcagcagttggggaaaacaccgttcgttaataaagaaaaaccgactccgattgatgaagcgttgagcatcatttattatctgagatatgtgtattatgataccatcggggaacttttcacgaaaataaaaacgacatttgaaaacggccattttcatctgcatgaagatctgatccagcttggtttctggccgggaggagaccgcgacggaaatccttttgtaacagcggatgttacgaaaagagtggcggaagaactgcatactgcaattttaaaagcctattacaacaacctgaaatcggttcgaagaagattgagtttcagaggcgtttcggaggttttaacaaaactgagcaacgaactgtattccgcgattttcagaaatgaaaaaattacggcagatgatattatcaaaagactggaagaagccgaaaaaatcctcgtggagcagcacaattcattgttccttgatcagttggtgaatttcaaagaccgtgtgaagattttcgggacgcattttgcgactctggatgttcggcaggacagcagaatccatcagaaagtgattgatgaggtttttgctaaagtattcggagccattgatgctacacacgaagaaaaattcaataagctaattcaggttactgaaaaagtaaatccggatgattttgaagatattgtaaaagatactttgcttacggtttcccaaatttcagaaatccagcaactgaacggattgagaggaatgaaccgttatattatttccaattccgatgcggtaaaagatgtgatgaatgtgtatgcatttttcaaagtctgcggttatcaggaagaagaaatcaatatggatatcgttccgcttttcgaaacaatggaaggtcttgccaatgcagaaaatgtaatgaacgaattgtaccaaaatcctgtttataaaaagcatctggaaaaaagaggaaatcagcagaccattatgttaggtttctcggacggaacgaaagatggtggttatctgaaagcgaattgggaaatttacaaagccaaagaagtgttaacgaaactttccgagcaaaacggaattaaagtcgtgttcttcgacgggcgaggcggtcctcctgcaagagggggcggaaaaacccacgatttctatgcttcacaagggaaaaccattgcgaataataaaattgaattaacgattcagggacagacgattacgagtattttcggaaataaagaacaggcaaaatataatttcgagcaacttttaacagccggagtggaaaatgatgttttcaaaaattcgaaaaaagaactaacagaaaaagagagggcgttaattattgaactggctgaaatcagttataaaaaatattcagatctaaaagcgcatcctatgtttgttccttatttgcaggaaatgagtacgctcgaatattacggaaaaacaaatatcggaagccggccgtccaaaagaggaggcggaagtgagcttaaatttgaagatttaagagcgattccttttgttggatcatggtcacagttgaagcagaatgttccgggattcttcggatttggttttgcgatgcagcaattgaaagaacaaggaagatttgacgaggtaagagaattgtacaaaggttcggatttctttaaaacgttggttttaaactcgatgatgagtatgaacaagacctattttcctttgacgtattatattaaaaacaacccgaaattcggtgcattctggaatgttctgtttgatgaatacaatgtttccaaaaatatcatgctggaattaacaggctttaaaatgcttcaggaagaagatccgctttccagaaaatcggtgaaaatccgcgagagaatcgttttgcctttgttgagcattcagcaatatgcattaatgaaaattcagaaaggggaaggtgatctggaagcctacggaaaactggtgacgcgttctttattcggaaatattaatgcgagcaggaattcggcttagtagaaaataataccaattagtcattacttaatttaggatacaattaaaaaatttcacgataattctggtcgtaaaaacaggacaattatttattgatttttaattaccatgaaggaagaaaatatagaacggctcaattctctgttttccaatttaaaaacggaagaaaaaaaactgcaggaaagtcttgccaagaagaaaagcgaggaagatatgtttattgaagggttcagaacactgagtaaaaacctcattgaacccaaaatgcaggaattcagaaggatgctgagagaaaacggatttggctgtaaagtaacttttaatgaagaaaataaaaacggtttgggcgtcaattcacaaacccatatgaaacttcagatttccagaaatgtggaatctaatttttatgcgaatgataaatttccgcacatcatgttcgttgccgataaaaatctgaaacgcatcggaattcatcaggacaccatttttcagaacggaacgggaaccgctgctttcaaagaacagaaatacactctggaaacaattaccgaagaaaatattgaaaaagaaattttagaatcgattgaaaacatattgatgaacagatagaataaattacctgtcaattattttatcataagccttctacaggctcagtgttacaccgttgaaaataacagtctgcaccggagaagtcatactgagcttgtagaagtatattttttactttaaaatttaaagctctaaaaatttttggtgtaccagaaaacaatggctgtaaaaacaaaggtgagaataaaccaaacaaaagccgtcactataattcctgccacaccatacagaataatactgaaggttttgttcgcggttcctgaatttttcaacagggtataagtttcgcctttaaagaaacgaaccgctaaaaatatcagaaatccaatacagctaaccgtagaaaacagcccccccccattaaaggctcaaaaataggtccgcaagataaaacagtcatcatttttattaattatttacattcaggtgaaaatatctcggatcgggatattgaaattcaaaattcagctcttccattaattttgcaggggaaattattcttccgcttcttcttctctccccttcataagtcagacctttctgcgcattgattatttcttctttgttgggatgaatcggcgcaacaacattataaactttagtctgagatttctggtctaacatcttttcaacaaccgaacagatgtctgcataatgaatatgattcaccaactgatccggataagagatatcatagtttttcagcagtctttcgccgcccattaaaccgcctaatctcaggatattggtttgaggaaatttctccagcataaagttttcactttcaacttccgctgccggaagatcatcctccgaaaactctttttcgatatccgggtaaacgcctgtggaacttgtataaaaaatctgtcggttgaaaactccgataaaacgaagcaaattttctctttttcctgtcatcggaattctggaacctcttaatcctgaaaaaggaacggcaacaataatggcgtccagttcagaagctattttccacggtttcatgtcagcatcagtttcatctggaaattttacaagatccgcatgatatcctttagatttcaaaacatccagttttgcttccgttgtggtggtagaaaaaatttcatagtttttcgacagacgttccgccaaatggtttcccaaccagccacagccgatgatcccgagtttcttcatattttttatttcctgaaaattacaattttattatggtttttcagcgctgaaaattgtaaaaaacaagctatgtataatcatcaaaatttcaacttttttatagataaaatattctttttggaaaacgcaaggacgcaatatttttattcgtctcagatctttaaggcgcaagaaaatcaaagattttcataaactaatgtgttctaatataatgcttaatctatttaaaatcttatgtgacttaagtgtttaaaaactcatcaacctgcaaggctgttattttgggtgcaacgaagtggagtcgaaaaatctaaaacaactgtattttaagagattcttcattgcatcaagctccggaaaattccattctgaataacggagtaactctactgtttcaagatgtaacacatcaatcacataagtttttattttcaatacttacaagatcacataaaaagaaaatgatcgatttctttaatctggaagcggaatgttaatttttgttttaaatagagcaaatctattacgaagatatttttaaaatcgatttttaggtctacctttagtatagacaaattttaaccttatcattattaaaaaataaaagatttatgagttcagcaaacagcccgttatttcatgaaatattcaaatccgaaaacgaaattcccgaagcatataaagttcccgaaattcatcagcgggaataccttctcaacggagaactggtggaatggaatggcgatgtgcagaatatttattcccctgtctgcattcctacagaaaacggtctggagagaaaactgttgggaagcatcccgaatatcggtcccgatgaagccatgaaagttttggaagcctgcgtaaaagcgtatgacaacgggctgggagagtggccaacaatgtctgtggaagggagaataaaatgtatgcagaaatttgtatacttaatgattcagcagagagatcttgtgatcagattgctgatgtgggagatcgggaaaacgttggcagattctacgaaagaattcgacagaacggtggattacatcaaccagacgattgatgcgctgaaagatctcgacagagaatcttcccgttttcagcaggcggaaggtacgattgcccagatccgaagagcgccgcttggtgtagttttaagcatgggacctttcaattatcctttaaatgaaatcttcacgacgcttattccggcgttgattatgggaaataccattctgtttaaacttccaaaacatggtgttttagcacattaccctttattaaatgcttttaaagaagctttcccgaaaggaacggtaaatacgttgtacggaaaaggttctgaaattattacgccgatcatggaaagcggaaaggtgaatgttcttgccttcatcggatcgagtaaagtagcgaacggactgaagaaactgcatccgaaagttaatcgtttaagagcgattttaagtttagatgctaagaatgcggctattgttacaaaacacgccaatctggatgttgcggtgagtgaatgtattttgggatctctttcttttaacgggcagagatgcaccgctttaaaattaattttcgttcagaaagaagtggcacaagagtttacccgcaaattaacggaagctgtttcggcaatgaaaccgggacttccatgggaaaaggatgtgaaaattactccgcttccggaagtgaataagccttcttacttgaaagagtgtatagatgatgcgctgtcgaaaggtgctaaagttttaaatgaaaacggtggttttacagaagaatcttttgtttttccggcagtcgtttatccggtaaatcatgaaatgaagctgtatcatgaagagcagttcggtcctctaattccggtggttccttttgatgatatcgaggaacccatcgattatcaggttcatgcagatcacggaatgcaggtgagtattttcagtgaagatgcgatggaagtttccagattaatcgattcttttgtgaatctggtaagccgagtgaatatcaattgtcaggctcagcgcggaccggatgtttttccgttcaccggaagaaaagacagtgcggaaggaacgctttctgtttttgatgcgcttcgttcgttttcaatccgttctctggttgctgcaaaagttacagaatccaataaaaatctactgaacacgattgtaagagatcatgattctaatttcctgagtacggattatattttttagtcactgatcttttaacctgattttggaactttattaagagttaacaggcgtaagagttttttttaaaacataagtcaaataagattttataataattttaagctttatatcagaacacattagtttatgaaaatctttgattttcttcttatgtgatcttttaagtatctcattaaaataaacttatgtgacttatgtgttatatttttaaaatagtaaaatcactctgtcattcagaatgaaattttgcgaagcattatgcaataaagaatctcttaaaaatgacagtctcgcagattggaatgtagagtttttaaaagtacataagccacataagattttataataatttctaaactttatatcagaacacattagtttatgaaaatctttgattttcttattttaagcaatttgattattcttaagcttagctttatcattatcttttgagccttttggggtttaatttgaaattagttaaacaacgaccataaaacaaaatccgcaatctgaaaggactgcggattatttgattagtaaaaatcaaaaacatatatttggaagaaaagttatttttccgttaaaaatctgctgataatactgtttaaatcatctgcgtgggttacatttaaaccgtgaggcgcaccttcaatgataacaaattcattattggcaattccctgtgcagcctgttttcccgcagtatcaatcggaacaatattatccgagtctccatgaacgatgagggttcttacgttaacgttggctagttcgggacggaaatctgtatttgcccagctttcagcacattttatggtggcaataggattcgcgaaagaagcaattgcccagtcgaaatccagttgtttctggcttacaggctttgaaagcattccgaaattataaaaatctttgtggaaagattcaaggaaagtgattcggtctgttttcagcgcattcataatttcatccagtttttcctgaggaactccgtcaggattgtcttctttctgtttaacaatcggaatgatggatgagattagagcgattttatctacattttctgaaccgtaattcgttaaataacgtacgacttctccacctcccatagaaaatccgaaaagaataacatttttaaggtctaactgtgagatgatttcatgaaggtcttttgccaatccatcataatcgtatccgtcataagttggtgaagattttccgaaaccttttctgtcgtatgcgatcacgcgatatcctaaatttaaaagcaccggaatctgcatttcccacgattttccgcttaacggccatccgtggattaaaataatgggttgtcctgatccgaaatcttcatagtaaagctggacgttctgatcgtcctgttttgtaatgtaaggcatatttatatttttggtgtgattcaggaattccaaatattaagccataaataataatgtggtatgtaaaaaattaaaataattattgtaacaaaatgcagcatttcctactaactgaagcatagcctaaaaaatgtctttactggaaaaggaattcttagagaaaattgaaaagcataaaggcgtgattttcaagatctcgaagatgtacatggataatcccgacgatcagaatgatctctatcaggagatcatctatcaggcgtggaaatcctacagcgattttcagaaaaaaagtgaattttccacatggctgtacagaaccgcccttaataccgccattgtctttctccgaagcgaaaaaaaacgtagttttatacagaatcagagtatagaaaatctccgtgttcagcaggaatcttataatgatgcagaggataggaatatgaaaattatgtatgaagcgatccatcagctcagtcctattgacaaagcgttgatttttttctatctggaagattttccgggtaaggagattgcaaagcaactgggcataacggaggtaaatgcaagagtaaagctgaaccgggcgaaaacaaaactgaaagaaattatcgaaaaacaaacggatctctaaactataaggtatgaaattagaaaattttaaagaactctgggaaaaagatcatcaggagcttccggaaatttctttggaaaagcagaacgaaatacattcgccactggaaatgatcagaatcaacatgaaaactgaattctggctgatgattctcacgcttcctatgcttttaataggatttccttttgcaacggaagattttaatgtaaagacaatttcgatattagtcgcttttcttacgttagggattatcatctatttttattcaagattcattaagctgtataaaatgctgaaaaagacaagtattaataccaattatgatcttttcaacctcaaaacacaacttttggtttttaaggaaatttatatttcatactacatctcttatattcctttagcgtttgtttcttctcttgagcagattgattttcagtttaatatggattaccattttgctgtttttgtcgtcagttttttgatcgccatttttgttttgtttattttaataaagtactggatctactatatgtacggaaaatacattgaagatgttatatgtcttgtggatgaacttaatggcgttgaagtagaaatgaaacaaagaaagaacagagataaaacgtggtttgaaagttcccagaaatatttcatcaaaaaattcggaattaaaggaaatatcctgaacacagtattgtggtttgcttccgcttatgttttcattattgtatttttaacgattgtcttattggcggttattctaatcggcgcaaagcttgatttcatcgacttgcatatccttcaaaaagccttaaacaaagggaattaaaaaataaatattcttaattttaatagaattgctgtcttttttgtaacaaactttatcttttcctactaactgtcagatttaatcaaaaaagaataatatgaaaaagacagttacaattgttaaagcattgattttttcatttgctatcggtattgcaccgctttctttggtaaaggctcagaaaaaagaacgtacagagctttctgtgaaaaattttcctaagcgtattactacttcatcaatgggaaatttcagttctgatttcagcgggcagaatattccttcggattatcttattaatcacttaggagagtggctgggaagtaatggagatcattctttttcactggtaaagactgctacggatgaattgggaattaaacattctgtatatcagcattattttaaaaatactaaagtaatggatgatgttatttctattcatgaaaaagatggaatggtaacttttgtgaatggtgagtttataaatagtacagattttaataccgcggcacaactttctgatcaggaagtaaaacagattatttctaatgaaaaaaatacagcttctgaaaatctgacattcggaacagcagaaaacgtaattgcaaaagtgtataccggtaaagatgtgaagctttataacaccactactgtagctacttcctcattaaaacctcttttctctgaggtgatctatattgataataatacaaaaaaaattgtaaaaacactttcgcagatttatcatgcagatactccttctgtaagtacaacatactacaaaggcaaccagtctattacagtagattcttacaatggaagttacagactgctcgataatgcaagaaaaatccatacgtatgatgctaccggttttacaggacagcttggtctcgatgcaggtggaaatcttgtattggcaggttctacggaatatacaaacagttctgcgaattttacttcagcagccacaaaagctccggtagaagttcactgggcgataaaatcctcttatgattattatcttaataaatttaacagaaatagttttgacggaaacggttctgccatcaataattattataatatggatttttcgaagcttagttcttcgtatcctgcaggatatggctttaatgcaaccgctgtaaaattggcaaacggcatgcagtttatggcttttggtaacggaaaccttcctggttctcccggtgcaaccaatactctggcttccattgatgtgggcggtcatgaatattctcacatgattatcgatagaaatggaacgggaggtctgaattatcagtcagaatcaggagcgttgaatgaatcttttgcagatatttttggaacagcgattgaattttacggagctccagcttctgctaactggacggttggcgaaggtgttcttaatgtttctccgggatatataagaagcatgtctaatcctaattccgctaatcctgctttaggtcagcaacccgatacctacaacggtacttattgggtgagtgtagtaggatgtacaccttccggacagacaaatgattactgcggagtacataccaacagcggagtaggcaactattggttttatcttctttctcaaggcggatctggaaccaatgacttgggaacagcgtttaatgtaacaggagtaacactggcaaaagcggaaaaaattgcttacaaaactttaacaacttatctcacgccaaacagtacttttctggatgcttataatggaacaaaacaagcggctgcagacctattcggagcaaatgcaaccgaaatacaacaggttgaaaatgcttggtgtgcagtgggggtaggtaattgtcaaaccattcttgccgtgaaagatacttcagaaatttcaaatgaaatcagagtttatccaaatcctattaaaaacggagtgttcaccattgaaaatactaagaatgatgcaaccttcgaaatttatgatgtttcaggaaaactggtaaaacaaaatgaaaaattaagtaaaggaaccaataaaattaatatttctgggttccaaaaaggaatttacatcattaaaattagtgtaaatggtactgctatttctaaaaagatagtagtagaataagttttcagcatcaaaaaaaacacaatgaatgcccggcggaatatttctgccgggttttttgttaaaaaaaatctttaaatgttctatgttaccctgcaactataattctacgaaatgtttaaacagatttaaataaaaaactgtaacatttttatgaacggcaaactaattctatagagcgtaaaattatgacctcattagaacacgaatttttaagagaaatagaaaaacataaaggaatcatttttaagatttctaaaatgtacatggacgaaaaagaagaccgcgatgatctttttcaggagatcacctatcaggtctggaaagcctatccgaaatttaaaggagaaagtgaattttcgacctggctgtacagaattgccctgaatacagccattatttttcttaaaaacgaaaaaagaaggagttttataggaactgaagatttttcggaatataaaatcattcaggaagaatttgatcatgaaaaagaagaaaaactgaatgccatgtataaagccattcatcagttgaatcctattgataaagcttttattttctattatctcgaagatttttccggaaggcagattgccgaacagatggggatttccgaaggaaatgtaagggtaaaaatgaaccgcgccaaaaacaagctgaaagatatcttaaacgcaaatacacaataacatttaaatcagacatcatgaatatagacgacctaaaaaatacatggaatgaagatcattcttttggagaaacccctgaaataagcattgagcagaaaaacagaatccatcttccgctggaaaaaatccgtaaaaatatgcggatggaattttggtccaccgtggctattttcgtttttgcttttgccttaattgctgtctgtgcaggatcttttaagtttaaattttacatcacgattcttataggatctatggtttttgtaacgtttttcttctacagtcagttttttaagctgtataaaaacatgagcgagacgatgatgaaaacgtatgacagtttgcaggatcttttgcatcagtttaacctgaataagcaatactacctgtctttttatcttgcttttgtcccgtttttagtctgcgaacttattatcgttctggagtttataccgagaccggttcctttatcggatacacagattgccattacgctaatttctaccatgatcatcacgatgcctttgctgcttttattgggaaaactttggtttaatgtgttctacggaaaatatatcaagcagattgaaacgcttttctctgaactgaaaaaatagttttcggggttttcttggttttcggcggcttcgccgccgaaaaccaagaaaacccttactgcgtataataagccggaaattcacgcaaaatcgaatacagatcccgccattcaaaataagccggacttgccgaacttacattttcaaaaccttgatcttcaaatagttttttggttcgggtaacatggaaatattgggaaacaacaataatgctcttaaaatgtaactgaggctcaagtttaagcgtattttcaacggttaatcttgtgttatctcctttattatcaacaataattacagaatcaggaattcctttgctaaggagaaactctttcattttatcgccttcatagaaaccctcttttcccaaaccgccactcacgagaatcttttggattctgtgttgctgatacaatgcaattccggtttccagacgtttttcaagccttgtcgataaagtcccgtcttcattcactttatttcccagaataacggcaagatcggcacgttttccctgatcagaaaaaccatcagtgataatataaatggagtgaatgataaaccataaaaacagagcagtagctatgatttttaaaattttaaaaatacttttttgcatcagttatgggtgtttttctttttcaatttcagtcatgatccaatccagttgcggatcttttttctcaagaatatcctccatggtttcagaaacttttacatccggaacaacacccttttgagtatcagtaaacgtaatattgggctgtaccagaagaacaccgatgggcagatcgatcttggaattaggcagcgtttgaaaagaataaaatcccgcaaccgtaccgtcattggctcctccggtttcctcacctacaagaactgctttcttatcatttttaagctttgaggttaaaatagaagaagctgaaaaactcgagccattaatcagcacaaaaactttccctttaaaaacatcatttttgggtttggatactttgtcggctctcgttttgtaataaaatttgccgtcttttttatacgtgctgaaagtctgtccgaagaaaaatgcaggatacatcaatgttttgaaagcatactgcaaaaaaccggattttctgaaataattggttttcagaggcgacgatttcgagattacctgtgacggttttatcaaagtataaggttcagaactaagataagaatacagattattaatttcttcaagcgaaccgccgtaattattccgaatatcaataattaaatattttgcatccgcttttttaatctttctgaacgtttctttataaaacttcgaagaaaaaacacccgaaaaacttttcacctgaatgtacgcaaccgtactgtcttgatctaaaaatttaaaattccggttataagaattgctgaaagcaacgtaatcattcacttttttctcctgcgtccgctttttgttttccttgtcttttttaagatcttcttcagattttgattctcttgtgagttcataagtctttttttctccctgataaaccgtttccagagttgcgtggtcttcgtagcctttttctgcaacataataattgaaaaaaacatctttcaggaaataaggctgaaaagtcgtgttgaaaccatcgctgctgatcagttttttatactgttcaatatattcagaaacaggaaccttatcgatcgagagaatttctgttcccggctttatattttggatcgaatctttattttcgctaatgtaaagcctgtcgttttttacataatattcaaaacggctgaacattccttttttcccttccagtgctttaatttcctttttgctaattctcttggacggaattctcagcgaaagatgaccttcacggatttccgcaatcacaggctgcaatttaaaataaaactgaagcggcgtaagcggctcccgaatcgtttgtttaagactgtcaaacttaaaatccagtgtttccttggtgatgtaccaatacagatttgggtgcgtttctttcagtttagaatacgcaaaatcaacatcctctttcagcttttcgggggaaatacatactttctgctgctcattgtgcttttttacagacacgcaagagcatagcgagacaattaatactaatatgaaataatttctgaggcgcattttcaattttaccaatgctaaaataattactttaccccaatgaattgttgatgtttaccataaacaactaaaatatttaaaattttaacacatttcaaattaaataaagcattttggatttcgccactttgtattaaacttgtttaaactaatttcagaattaaccgcaaaagggacaaaagatgatgttaaagcgaatttccaagataatcaaagcgctcaaaagaataaaaatcaaagatttttaaaaactattgtgttctttttcatttataatgatcaactttaaataaaaaatttagtagatcttttgtgacttttgcggttaaataaaagtttaaacaagacttattattaaaatgaagttctttaaattcattttaaatttaacctcaaaaggtatgttaatatgcaaattattttggttttgttattttaaaatatataattgtttatttagttttagaaaaagcaactttaaagagttttccagcataaactgcttcttagagtaacattttgttttccttttgaatctcgctaaataatgccttattctggaattatagctctcaactgtgaatgtttccgcttttgattcgcaatgtttctctgtaggaattaattctgaataacttttccaatagtcactgcaaaaaccattaatttccctgtcttttaaactgttccagagctttttgaaagtggaagtatttcttttcccacaaacaaaatcgatgtagcgctttccaaatctatcaacagcaatccagctccaacagtagtttttttattttggatgtagctgtgaatttcatctaattctactatttctataggttcttgagattttggtaaagaaaccgattctccccactttttcacccattgatataccgttccgtaactgatattcaacactctcccaatagctcgaaaccccattccttccaaatacatttctaatgcaagccgtctttgctcaggactttttacatccgatttgctttcaacactataaaagcatccacagtttttgcatttatacctttgcaaacctcttgtaaaacccgcttttactttatctaatgattgacatttataacatttcataatactaatttatgaaatatattttaatttaacaatatcattattttttaaatttgtgtaaactattttttgggaaaactattgtttatcccgttcagacaggcgaaaccctgtctgtatttttattttcttcataattgatattgaattcttcctcttttttccatttaagtattcaacttgaacaactaaagtgttacaatcttttgcatcttttgcggtaaaaaagtttagacaagtttaataaatgaaacgcaattgcgaacaaaaaacattcacaaaaactccgaaaaaaaactttgcgaatttgacgttaaaaacaattactaaaaattattcggataaaaaataaaggaatttcagttttaaatcgtcatagcttataaagtcatacatttgacaattatttcaagaaatggtttatacaattattgcagtcgcaattttagtggttttattatattttgtaattacaggacaggaagtctttggcgcagaagcaaaaggagagaggttaaaaagaatgcagcattccgctcattacagagatggtcagtttcagaacctcagtgaaacaccctctcttgcagaaggatattccatgccgaaagtaatgttcgatttcttttttgctaaaaaaaatccacttttgaaaccactgagaaatattccatccattcatacagatttaaaaaatcttcctaaaaatgaagatatttttgtgtggttgggacattcttcgtactacattcagaccgatggcgtttcatttcttatagatccggtgctaagttcttacggttcgccgtttaagttttttaataaggccttttccggagctgatatttttaagcccgaagatattcctgagattgattatctggtgattacccacgatcattacgaccatctggattatcctacagtaaaagccattaaaaataaagtaaaaaaggtcattttaccattgggagttggcgcacatctggaaagatggggatatcaaccggaacaactcatcgaagacgagtggggaagtgaagttgttttaaaaaataatatcaaaataatttatactcctgcaagacatttttcaggaagaaaagtaaaacgaaatgtcacactctggacttcctatgttttggaaactcctacaaaaaaactgtttttaggcggagacagcggctacgatacccatttcaaaatgatcggtgaaaaatacggacctttcgattatgcgtttatggagaacggacagtataatgaagcatggaaatacattcatgtgttgccggaagatgttattcaggcaagtattgaggtaaaggcgaaaaatatcattccggtacattcgtctaaatttgcattggcgcttcacgcctggaacgaaccgctggaaaaagtaacgaagctcggaaaagataaaaatcttaatattttaacacccatgatcggcgaacctgttgatctgaatgcttcagataacacattcagagtctggtggcaagactaatttacgcgtgccaaatatctttgtatcgggcaggatgattttcaaactgctgtcttacaaaatcacattcaggatctaccagaagatctttttcttcggcatagcgaacaagttcgtccagaagcattttggcgtaacctttcccttcatgctcctcttcaagtttggtgtagtagacaattaaaagtctgccgtcgatctcaatggacatatagcccgacttttttccgtcaataagtatctgcaattcatcctgatacggagatacttcaaattttatattttccatacgattgagatttttcggtgattgaaaaagattggagaacttttctccttttaaaattacaaattaaaactgaaatctgcgaaagttttaagggtttttaaaacctttaagaaaaatttatgaatgatttgtatcttttatataatcagtaatttatgactgttttctgttgcgtttagaaattgtcttaaatggtttggcattcaaattgaaaattcataatcagtttaatttaaaatgaatgaaagatgaaaaagttaatcataacaatgatgttggtaggaacttttggtttatcctacgcacagacagactattataacgattacagaagaagtattaccgatgttaactggcagagtgtaatttcagatctggtgctttcaacaacacaggcaaaccagatttatgcactgaacgaccgttacagagattatgattcctggaacagagtgtatgataataatcctgaccgatggagaaacgaccgttatgcagagttggaaagaattttgggaagggataaatatgctaagtttaaaaacagatattacaaaggacagaatccggtagcggtttacaaccgaaataaaaataatgataaacgctacaagcacatggataaaaaagccaaaggttacaaacagaaccatggaaacggcagaggacatcattaaaaccaattaatcaattatattcaatcttaaacggctggtcggaagatcagtcgtttttattttatctatcgttgttatttcatcattgaaattctgtttgaattttataattttgaaaaatggaatctaatgaaaccgtaaaaggattttaccagcgcgtcggtctggagtgcatcaaaactcccggagtaggacattttaatgttttttcacgcgaaaactgttctcttattacaccgtacagcagaagagattattataaaatttctctgattatcgggaaaggaaaactgcattatgccgacaaatggatctatgtggatcagccggctttgcttttttcaaatccggtgattccttactcatgggaagcggaagataatgatcagaaaggttttttctgcctttttacagattattttgtgcatgacggaaaccgtctgggaaatcttcaggattcccagctcttcaaaattggcggaactccggtttttttcatcaattaagaacagcagagaaccgttgccgatatttttattaaaatgatgaacgaaattcagtccgattatcttcataaatatgatatgctgcgtgcttaccttcatcttctgatccacgaaacgatgaaaatgcatcctgcggaaaattttgaaccttatcagaatgcttcgcagagagttgcttccttattcatggaattactggaaagacaatttccgattgacagtcccgaaagatttttaaaactgaaaagtccggtagattatgccgaaagtctttccattcatgttaattctttaaaccgttccgtaaaggaaattacgggaaaaacgacaagtcagcagattgcggcaagaattattcaggaagctcatgccttattaaaacataccgactggaatgtgtctgaaattgcctacggattaggctttgaagaacctgcctattttaccaattattttaaaaaacaaaccggaatgacacccaatgcagtaagaactgcgcttgtttgaattttataattcttcgtttgaattctatattgaaatcattcaacggctgttataattttgtactgtaactttaaaatcacaagctatcatgaaatttagaaaatttggaaacaccggaaaagaattatcagccatcggtttgggatgtatgggaatgagctttgcttacggaccaaccgatgaacaggaaagcatcaaaacccttcataaatcgctagatctggggatcaacttttgggatacagccgatatgtatgccaacggagaaaatgaaaaattaatttcaaaagttttggttccgaaccgtgacaaaatttttatcgcaaccaaattcgggttcaggtttaaagacggacaagccggtcacagcggtgctccgggaacgtattttgacggttcgccggaatggattaaaaaggcagtggatttaagccttcaacgcctgaaaattgatgaaattgatttgtattatgcgcacagagtggatcccaatattcctgtggaagaaacggtaggtgcaatggcggatctggtaaaagctggaaaagtaaagtatttaggtttatccgaagcttctgcggaatcgatcagaaaagcacataaaattcatccgattaccgctttgcaatcagaatattccctgcttacgaaagatgtggagcgtgaaattctgcctgtaatccgcgaactgggaatcactttaattccttatttacctttagcaagaggacttttttcaaatattaatgaagctcagaattttacagatgaagatttcagaaaatctttaccgcgttatcaggaaaaatatcttgaaaataacagaaatttagctcaggagatcaatgattttgcggtttcaaaaggcgtaaaaggaactcagctagctttagcgtgggttctgaatcagggagaggatatcattccgattccgggaacaaaacgcatccaatatctcgaagaaaatattgaagcagccaaaattgagctttcagaatccgacctgaaaattatagattcaatcttaaaaaaatatcccgacgttggtgaaagatacagcgaaggatcaatgaaattagtcaataattaaaattgcatgaattcagattttcaggatccttttccggaaatctggattttcaattgataatttttaacatcagcaatggttacccttaaagaaaaaaacaaatttattgctacggttttagcatttgccgttattccgatgtccggattggcaacggatatttatctgccttctatgccgagtatggcaacggaactgcatcagacggaaagtaatattcagcttactttatccatatttttaatcagttacggtcttacccagttttttgccggaagtattgtagattctttcggaagatataaagtttccatgatttctctggcactttttgtcgcctcttttttaattaccgctacaacgcagaatatttttgtgatctatgcaatgcgtgttttgcagggtgttttgtctggctttgcagtcgttgccaaaagagctttttttgtggatgtttatgaaggagaagagcggaaacattatctcagcattatgacgattgtatggtcggtaggacctattgttgctccgtttatcggaggatatctgcagaaaaactttggatggcagtcaaatttttacgttttggcagggtacagtttgttattgctgattcttgaatttatattctctggtgaaacattaaaaaagagaaatccatttcatttggaattcctgatcaaagaatacaactccatgtttaaagctaaagattttttctacggaatgattatgtgcggtttgagctactcgatgattatgttttttaacctttgtggttcctttattattgagcataaaatgggctattccgaagttgtggcaggatatgtttctcttattctcggttttgcgtggatgacgggcggatttttaggaaaggcattaattaacaaagcttttttacccaaaataagaaacgctaactttattcaactgcttctgattgctgttatgtttgccgcttcctgtttctccaataatatttacagtctggttgcgtttgcttttttaattcatgtgaccgcaggatttattttcaacaattatttctcctactgtatcggaaggtttcccaattctgcaggaattgcaggcggtttaacgggtggagtagccttcattattacttcagcattaagctatggaattgcagcattcataaaacctcaggttcagcttcaggttgcggaaggctattttattctgggacttttaggactgtttattttaagcatgattaaattcagaaaagctcatgcttaaaagtttatatttaaacttgtttaaactaatttcagaattaaccgcaaaagggacaaaagataattttaaagcgaatttccagagtaatcaaagcgctcaaaagaataaaaatcaaagatttttaaaaactattgtgagctttttcatttataatgatcagctttaaataaaaaaatagtagatcttttgtgacttttgcggttaaataaaagtttaaacagactttttatttaaattttctacgacatagttttcataataaatcctctcattttcgggaggatttgtttttacctttcatattttaaagtaatttttaaatagaaaaagcccctttatgaaaggagcttctgttaaatatattgctaacaatctcttgcttaaatttgtgtgattgtgtatgttcctgttgcatcgaaattgatactgaattccattttgaaatttttaggtgttaacgttaaatttggaattgttatactgcttccatttacatcaaaacttccatcactaagattatcgcctaattgttcaccattacttaaagtaattacaaatcctgagaaatttgatgaagtaactccggaaaatgttatggtaaatttatttgttgcggtattgtaagtagtgttagatacaataatggacgaactgagattactcgttgaaggatttatattctctgttgaaacgatagaatacattccataattagaaagacctattctataaaatccattagaggtgatattaaaactgcttccattcgctattaaattattttgattatctgatccataaacctgcgcagaagaattttgtccagctatgaatttaatttgtgtatttgccggaaaatatttgtatcctgttttctgattagaagaactatttctaagtaattcagcagaagaggcgttaaaattattataagttccgaacatataaagatttgcaggaaatgtagtatttgatgatccagacgcaacaggcaaatttaaattaccggagttatcaactcccaaaatataagttgttccattaggagaagttagcgtaattccctgtcctgcacctgttacaactgtcttgctcacttgtgcataaggaacgctcattagctgatttaccccaacattcgtatagttagaacctcctgcaggatccatttccaccttaacaaatttggcgttggttccccagttgatcgccccgaaatttcctgtcgtagctgttccctgtccgatgttcaggtttaccagacctttggcgttggtagttttgttttgagtttctgtatataaaaccgttccgttggctgcattatccaggatgctgattctcaaagaaacgtttccgttagcaatcggagctcctgctgcattgaaagcaatcgtctgatagctgaaagcctgcggaacctgcgcacttactaaacttgctaaaaataatcctatagttgcgtaaagctttttcatgttcaaatagtttttttaaggttttttgatgattttaataggtttgatgtcggagtttttgaaaacgatcatataaactccctgttgaagagatcttagatccagttgttcagaatctaatttagttttgaaaacaagctttcccgaaagatcatagatttccgcaccttcaatttttgattttgaattcagtttaacgtaaatgaaatcagtagtaggattgggataaattttcacatgatctttttcaagttctgaaacacctaaaatttgcaaaacagactggtgaaacattcccattgttccggaattcgctttgtcgggatctgtaggaatcacataaatttctcccaccgaatgcgtaaagttatccgcagaaaccgctcctgaattgatatttccgatcacagactgggcaaaaccaaaaaaaggcactccgaataaaagtagagtaattttttttctcatggttaatcatttttaaggattgcgaagataaataaattttccattacaaaaaggtttttaagacttatgttattttatttccggtttaattattttttaaccattatttgatgggaaaagttttcttttttagctaaatttgaaaaacattaaaaaaacaaattatgtcaagtattacattaaaaggaaatgcagtaaatacaataggaactttgccgtcactaggaagtacaatcaaagattttgctcttttagatgcaggactgaatgtgaaaactctggaaacttttgaaggaaagaaaaaagtattcaacattttcccgagtattgatactccgacttgcgcatcatccgcaagaaaattcaatgaagaagcttcagctttagataatactgttgtgatcaacgtatctaaagatttgccttttgctttgggaagattctgtgctgcggaaggtctgaacaatgtagaaaccctttcggatttcagaagcagttttggagacgattacgaagtaaccattacagattcgcctatgaaaggacttttaagccgtgctgtcattgtagcggatgaaaacaataaagtggtttacacagagcaagtatcagaaattgcagatgaacctgattatcaggctgcattagctgcgttgaaataaaaaccgatccataaaaaatcggagtcctgcacagtctgcaggacttttttctttcctgttttccataaaattactgatcacaatcattaaaaattaaaaactttccgcttacctttacacaatgaaacgttccggaaccgcagatttaccccttcactatggcaaagtaccgcgttggctttacgaacggatgtcgatcctcggtctttctatcgttgaggtaattctcatggagtatggtaaagacgaagttctccgccgactggcagatcctttctggtttcagagttttggcgcggtgatgggaatggactggcattcttcaggaatcacaacctccgtaatgggagctttaaagcgttccatcaatccaaattctcaatcattggggctgtatatttgtggcggaaaaggaaaattttcccgcgaaacaccttcagaactccttcagattgccgataaaacgggattgaacggaaatgatcttgtaaaagccagcaaactttcggcgaaagtagataacaccgcaattcaggatggatatcaactgtatctgcataattttattctgtcggataacggaaactggagtgttgttcagcagggaatgcacgaatcggacggaacggcaagacgctatcattggcattcggaaaatataaaatcctttgtagaagagcctcacaccggaatcaacggaatttcaagaggaaccattttaaaccttacagatgcagaagcttccggaaacagaaaaggaattttggaaatttcccacaccgattccgcggaaatcatgagcgatttttcaagattaattcttcccaatcatcacgatgttcaggcttcggatgttgatctgaaaagacttggtgctcttttatatgtaaccagagaacagcagccacaaaatttcgaagatttgctaatgctggaaggcgttggtccgcgaaccatgcagtctttggctttggtaagcgaagttattcacggtgcgccgtcaagattcaaagatcctgcgagattttcgtttgctcatggcggaaaagacggtcatccgtttccggttcctaccaaagtgtatgatgaaagtttgcagattttaaaatcagggatcgaaaaatctaaacttggcaattcagacaagttaaagaccttaaacaagttacatcagattatcgaatcgactgagaaagattttactcccgattttgatattcaggaagtaattgaagaagaaagacagaattcatggcgtttcggaggtaaaaccgttttcggtgacgctcagaaaccttcgaatccaaaacctattcagctttctctgttttaaaatctgttaataatcaaatatatttgttatcctaacagaacaaagtggattgaagcatctcaaagtaagagcgtgattagtttatgatctcacaaatcatcactttatgtaagaattacttcatcagttccaataaaaattctatttttaaaacttcaaaaacattcacatgatgagcaataaagccttagaaatctgctacgatttcccttttttccttgatgatgagcttgaagaaatatttcaggcacatgaaaaagtttcttttcataaaggagatttcattctggaagaaggaaaaacagccaacgaatattatattctggagaaaggtctggctcgctcatttgtcaacgattttaacggaaatgaagtaacgatcaacttttttgttgaaaatgaaatcatcatcgaagtttcatccttatttcagagaaatcccactcaggaaaatattgtctgcattacagactgcgaatgctggaagtttgattttgaaacttttcaggaactgtttcataaaatcccgaatctcagagaatgggggagagcatggatgtctcagcagcttttctttggtaaacagcgttctgtagagatgtttaccctttccgcaaccaaacgttatctcaatcttttagagcagaagccgcatgtagtacagtttgctcccttaaagcagattgcctcatttctgggaattacagatacttccttaagcagaatccgtaaagagctggtttcccatccgaagaaaatttaaatcttgtcttatggcaagttgatttttattttaacttgataactttgagtataattttaacagtaaaaacatcaaaatgaaaatcaatcagatttatgtgaatcttccggtgaaagatgtacagaaaacaagagaattctggacaaatttaggcttcgctaccaacgaagaaatgtcaaatgacaagtccgtttgtgttgttatgaacgaaaatacctatgtgatgtttttaacggaagagtttttccagactttttcagaaagaccggttccgaaaggagatacaacgcaggttttggtcgccatcagtttagatacccgcgaacaggtagatcagatggtaaataccgctgtggcgaatggtgcaacacagcatgaagaaccgcaggattacggatggatgtatcataattctttttgggatattaacggacatggctggaatgtaatgtttgctgatccgtcccaaatgcctaaagagtaaaaccttaacccatatcatttaactcttacatcaatttttgtgaaataaaatttgtgcggatgtttctttgtcatttttttaaggaatttttcttgaactgtatgagtttaaaaaaatcaataaaatagattcttccttcgtcagaatgacaaattatccgtttgatgaaaacactaatcaaacgctatacacaaattccacaaatagtattagtgttattcgtgaaaaatattagagctatttgtgtttaaaatattaatacacaaattcaacaaatattattggtggtattagtgaaaaaattagtgctatcagtgtttaactaaaaaaaataaaaaaatcatggctaaattaaatccttacttaaattttgatgggaaagcagaagaagctttcaatttttacaaatccgttttcggcggggaattcgtgggtgaaatttacagaatgggcaatgctcccggaactgaacatttatcggaagaagaaaaaaacagggtaatgcacattgcacttcctgttggcggagatttgctcatggcttcagacattgttccaagtttcggacaacaactgaatgtgggaaataacaattacgtttctgtttttccggattccagagatgaggccgaccgactttttaaagggctttctgaggacggaaatatagaaatgccaatcgaagaccagttctggggagattatttcggaagctttcaggataaatatggtgttcactggatgattaattataacgaagaatacgtaaaatagacttatctttaagctgaattatattgaaggggcaacttaactttggttgccttttacacttttaaaataatattatggaaccaattcacattgatattaccattctggcgcctgttcagaaagtttgggactattacaacgaacctgaacatattacaaaatggaattttgcccacgaatcctgggaatgcccgagttcagaaaacaatctcagagtcggaggacagttcaaaaacaggatggaggccaaagataaaagtttcggatttgattttgtgggaacgtatgatgaagttattccgaacgaaagaataaaatatcatatggaagacggaagaaaagtggagatcatttttgataagatcgacgaaaatacaaccagcgttaccatcacattcgatccggaaacgcaaaatcctgtagaaatgcagagagaagggtggtacgctattctgaacaattttcataagtatgtagaaaacaattaagaacaattttaattttcagaatcatgatcaatttagtgataatggcaaaatgtttaagttccatttgcgcggtgagtcatgtagttagcggaacttttttacagggaattctggctgctcctgcgcaaagagcattggcaaaggaaaagattgattctcttgaaaaactttcagagtattctgaaaaggaaatcatgcagcttcacggtttcggaaaaaatgcaatgcagaaactgaaagcttatatgaaagaaaaccacgtttcttttaaaattgatactgaatagaaattataccgggatctacaaaattttcactctaaattttgattaaatgcttcatcgatagtacagattctgttgaactattgatgattattcgtgaaaaatatttgcagctactcgtgtttaagacaaaaaaataaatttaaaattatgaacaaaaatattttcccgtgtctttggtacgacggagacgcgaaagaatctgcagacttttactgcaaaatatttgacggaaaaattaccacagatactccgatggtgatgaacatcgaactttttggtcagaaaatgatgcttctgaacggcggtccgcatttcagaaaaaatgcttcggtttcttttatggtcatttgcgaaacggaagatgaggtacaacgatactgggatcagttattggaaggcggaacggctttaatgcctttggattcttattcctggagcaaaaaatatggctggctgaaagataaatatgacgtaacctggcaaatatttttaggcgaaaagcaaagcgaccaaaagattattcctactttgatgtttatccatgaaaataatggtaaagcaatagaagcgatggaattgtacactaaagttttcccgaattctaaaatcggaaatattttaagatacggtgatggaagcgaaggtcatcctgctcccgaacctgctgaaaatattcagcatgctcattttgaaattgatggctatagtttcttctgcatggacaattcttacgatcatcagttcgatttcaatgaaggaatttcaatggttgtaatgactgatgatcaggaacaaaccgatcattactggaatgccttaacgattgacggaggaagggaaagtatgtgtggctggctgaaagataaatttggcttcagttggcagattgttcccaaaagactgcttgaattgatgaacggatcagatccggtaaaagggcaaaaagtatttcaggcgatgatgggaatgcagaaaattgttattcaggatctggaagacgcttataattcttagtattcaaataaaataagaaagcagaaggtttgaagctttttaaccgtttaaaaactttctgcttatcttcttcaaattcttaattttccttttcggcttgctgtttgatgggtattcataaaagatttgcttatgaagacacagaacaagtcagactcaaaatctaaagttcctaaagacggactttatcccgaaattatacggaaaagctatttgggaagtaaaaaacttcaaaataaaaaagcggtaatttccggaggagacagtggaataggacaggcagttgcggttcattttgcgagagaaggagccgatgttgcagttatttataaagaaagtgacaaggatgctaaagaaacacaaaaactcgtagaaaaagaaggtcgaaaatgtattttgctgaaaggggatgtttcaaaaaaaactttcagaacaaaatgtctggagaagatcaaaaaagactggaaaacagtggatatttttgtaaacaatgcgggaattcagttccctaaaaatgacattgaaaagatttcagacgatcagatccggaaaacctttgataccaatattgtttctatgattgctttcaccagagattttttaccattgctgaaaaaaggaagcaggattatctgtactacatccgtaacggcataccgcggaagcgatcatttaattgattactcggctacgaaaggagcgattaccactttcatccgttctctggctgtaaatattgctgaaaaaggaattttggtaaacggcgttgctcccggtccgatctggactcctcttgtgaaggaaactttcgacgatctgtcaacttttggaaaagacaatccgttaaaaagagcaggacagccatcggaagttgctccggcttatgtttttctggcttcggaagattccagttttataacgggagaaatcattcatattaatggcggagactttgtaggaggataaaatcttaattaaaataacagctagtttatacagttttttatggaaaaattacattttgatattcagatcaatgcggaagcggaaaaagtgtggagtgtactctgggacgatttttctttcagacaatggacttctgcatttacggaaggctctttttatcagggaaacttaaaagaaaatgagatcattaaatttctggatccccaaaacaacgggatgttcagtaaaattgttaaattaattcccaatcaggaaattaaatttctccatctcggtgagatttacaatggagtagaagcaccgcagaactggggtgaagccacggaaaaatacattttgactgaagatgaaaatacaacccatctgaaagtggaaattcagactttagaacagtttaaaagttttttcgaagaaaaatttccggatgccctttccaatgtgaagcatttatccgaaaaccaactctaaacatttaataaaaacaatatggaaactttatcttacgaaatcatcatcaacgctcccaaagaaaaagtctggggtgttttgtggaatgaaaatacatacagtgagtggacaaaattttttaatcccaactcttcatctttcatgaaatctgactggaaagtaaacgggaaaacctattttacaaatgcagaaggagcaggaatggtttctacaatagacagtctggaaaagccggatcagattgtttttaaacatttgggaatgcgagatgaagcaggtaacgaagatacagaaagcatggaggtgaaacagtggagcggctgctttgaaaaatattttttaattgattttgatggcaaaacaaaacttcatgccgaagtacagactgaaaaagattgggaagagcatatgaatacaggctttacaaaaggtctgcaaattgtaaaagaacttgctgaaaaataattattttcgaatttattttaggctatatttacagttgataaaattacgattaatcatagtgtaaatcttagtatctactggaaacaaaaagaaatcttatgaaattacttaccattctttttacaacattcattttggctttagtagcaaccaaaatttttcagggcgactggaattttttgttttcaggaaatttgggaatggctgttttcatcatatttacaggattttctcattttaaatttcaaaagggaatggcaatgatgattccggattttatcccggcaaaactattttgggtatacataacaggaattattgagattgcagccggaatcggattgatgattccttccattcgtgaactgactgccattttattgatagttttttacgttttagtattcattgccaatatcaattcatcccgaaaaaagatcaatatttttaaagcggatttcacaggtcccggaatgacttatctgtataaagaaagaattccgatgcagattattttaattctctggacttggtacttcggaatttatctgaattaaaacatatcattcacaatacaaacgaaaggcttagcttttcgtttttttgtttaaacattagtaatgaccaaattttgcttcacgaatttcacaatcagaaaagaaaatatcttggataatttgtgttattagcaaaaaaaagtttgtgttattcgtgtttcaaaatacggatgaataaaacaaaatcttaatttcttaaaaattattttaaatttattaaagtaaaacaaaattttcaatcgtcatagcaatatggagattgtcgaaaaaataacaatgccacagaaggagaaggaaaatatcatctcacagaccgtttcaaagtacggaggaaagctgatgtcgtacattcgtccgaaagtgaaaaatacggaggatgcggaagatattctgcaggaagtgtggtatcagttcagtagtcttaccaatctttctgagattgtgaatgttggcggttggttgtacagagtaacggcaaataaaatcacggacaaataccgcaagaagaaaaccgagaatcttgaagatttcgtgtacgaagatgaagacggcgatttttccatcaaagatattctgctcatggatgaaagcgcaggtcccgaaatcaaaatgtttcaggatgagatctggaaaaaacttttcgaagctctggatgaactgccggaaaagcaaagactggtctacgtggaaaacgaactcaatgacaaaacccttcaggaaattgcggatgagcatggcgaaaacattaaaacgattatcagccgtaaaaattacgccgtcaaacatttaagaaaccggttgaaaaaattatacgaagatttaaacagttagtaaataaaaagatatgaatcataaacataaaaaaggctggatttttctgattctttgtccgccattgatttttttaggcgttacatggatcgtaatggcgctctggaattgccttctccctgaaattttgggcgtaaaatccattactttctggcaggcaatgggaattctgattttaagtaaaattcttttcggaggtttccatttcggaaaagggatgagggattttaaagaaaagaagatgagagaaaaaatgatgcatcttacacccgaagaaagagaaaaattcaaagaagtctggagagaccgatgttcaacagggtttttcaacaggcacaacagaaccaacgaatagtaaaaattttagaagtagtaaagtaaaatggaaatctattcgtctatataaaaaagaagaagtagtaaaatttaaaattttgaaaaaatgaaaaattcagtattaaaaggcgctttagctgctttagccgtagtaggagttgcagcagttgttaaaaaagcagcgcagagaaaaagatttgtaaagggtatttttgaggaatacggaatcaaagaaaaatctcctttcggattggcggataaaatcagagaaatgaacgacgatcaatatcgggagctgaaaggaaagtttaaaaaagaatttgcttcaagatgccgccacagaggtttcgaaagaaaagaaaacgtcgcagaagcataataaaacgtaactcaattgaaattgtttaattccggctcgggaagcttcgcttcccgagccggaattttttaccgtcagtgtgataagcgaagcgaaaaagcaatcttggaaatagtgtttcggttcaggcggctttgccgcctgaaccgaaacattaaaaagatttaaataaacaagcaagcttgagatattttgataaatgttctaaagatagcgttcctacggaacgcagaacgtcctcttaatatgatttctacacagataaaactccaaagagtttttaggaattttactttatacgactttttgttttaaaagaaaaaaattgaaaagcataacacaacattattcgagatctttgtgaaattattcgtgccatttgcgtttaaaaaagaaaataaaatccttatttttgcatagcttaatgaaagattactactattttctcgggatttctcacgatgcttcggaagaagacatcaaaaaagcgtatagaaaattatctttaaaatatcaccctgataaaaatgataacgatgactttttcgcagaccggttccgtgaaattcaggaagcttacgaaacattgagcgacaaaagcagaagacattcttacgatcagaatttagaaagtcatcagaaaagcttcaggtacaatattccgccttctattaaaacttttacggcaaacaaaattcatgcgaaaaaaggggaggagatcattatcaattggcagactcaaaatgccgatgtggtgaaagttttacctttcggactggaaaaaccttatggagaaagagtttttaaaataacagaatttaaagacggaaaattccagattttgcttcacgctacgaattctttattgcacaaaacagccgttcagggaattacgattaccgaagttttcgaaaacaattcggaaaaatttaaagataaggcagaggaattatttaagtcacagccaagaactgttgcaaatcctcatggacagccaaaaatcgcgagaattattatcgggattgtcttattaattctggcggtctatttcctgttaaaaagctttaattaagccattttctttcttcccgggcactttttacatctttttccctttttaaattttttgcagcatgatttcttgtcgccgcaatacatttcttcggtattcattgaaaaagcaggagccaatggagctactttgaaaggaacgatcatattcatgatgcaaatatattaatttagaataaatccagataataaatttttaaaaaaattaatgatatatatcaaagagatttaaatgattggcaattatgatcaataaaaaaggacaaacatcaaatgtctgtccttaaaagtgaccgcagaaggattcgaaccctcactgtcggagccgaaatccgaagttctatccattaaactatgcagccgtattgagtcgaaaagtttgagactaagagagttttaaatctgaataaataaacactcaaacacaaaaactctcccaccctaagactctagaacgtaatcttcacgcctcccaaaacctgtgcacccagaactttatagcctttgtacgtctgatattttgagctcagaagattatttccaagcgcgaaaatactgaaatttttgtgaattttatactctgcagacaaatttaaatctgcataacctcccactttatcgttggtgttctctgtagactgatagaacattggacttccaactccctgaatcataaatgaattcgttgttctgtcgctggcaaaaatccctttaaaacctaataataatttttgatccagcatcgtatattttgctccgattgttgccgtaaccaaaggtacattgtagatattttcgtagtttttaagatcaaacttggtaaatttcacttctccgtccaacactaaatttgccaaaggaaaatactgtaaactacctttgatgtctcctacatttccgtcatcatacaccgcagaaaaagtattcgcgaaattataggcagaacggttcagggtgaaattcgtgtcaaaaagatcattggctttaaagaacataatgtctctcatttttccgtaccctgcagaaacatcatacttaaaagtttcatcaatatctcctcttaaacctacataaaaatgatattttgtttcagttggtcttaaatactggtcagaaatgatgaaaggattctgctgtagtaaatccgaatacgtattcagttttaaacctccgtcaactcctccgtaaaatttaaactcctgtgctgcagcaacctgaaattccgcttcaggaaaccaataggttttattgtttttcatttgctcagccatcagatcattctggtttttaccattcagaaacgcgaactgagatcctaatttcaggtaagaatcaccttttctgaaagtaactttcggactcagacttgtattgaaaaagttggacgaatttttatctctgatcgaaaattcagtttttaccgtttccagaccaacgcctaaatctgcattcagactgatgcctgatttgccgatttcaaccccatgtttcgagaaattcgccaaaacggaagcctgattttcctgagcatcaaaatggtcttttaaaaatgaagatttcactcttacgtcattcagaatttcgttcgaataaaaatcataataaccgtttactttaaactgattgactctctgatccagatcaacatcattgctcggagtcagggcataaatcccgtagtaattatagctgttcaaaccatattctgcattcagattgaattttcctttatctccgtaagaattcagaaaagctcctaaagtggttgaactttgcttagaatcccagtcgtattccttttttaaaccctgtgttgaaagaaaatgagcatccactccaacctcaattttattttccagcgttttcgaaatatttgcatcgcccagaattttaccgaaatttcccattccgaactggatatagttattctgcgcagaaccttcaaatttcggagtaacatctgctccctgaatggttgatgttttaaaatccgaaaccgcaggaacatccgtaatgttgtactgtacaggattctgagatttttcttccggcggataatttttaatggtttctaccgaagttttctttttttcgatcttttttacttccggttccctttttttattgagaatcagtttttcttctttgatctgggaaaacgctaccgacgaaacccctaaaaatatgatggataataattgaattcttttattcattactttttgtattaataatgtaccaatttatcaatgcaacaatctggcaatgtatagtttgattggtaaactgttacattgataaattgatacattaaatatatttttactttttaatctgctttttaacttccttcgcttccgctacaatctcagggaaatctttataattttcaataatctgatcacaggtataacttgcctgataattgtctttcagaccaacatagtttttcgccatcagaacaagcgcttttgctccccaatattcttcggaagcataattattggccaatttaaagatcgtttcattagaggatttaaacgcttttcctttgttttgataataagctttcgcgtacagagattctgcggcaaccgaggtattggatgatttttcaagagaagcataagcagactgtgcgtctttgtcttttcctgaattcatcagacttcttgccttaataacttttgctgtctcaataaccgctgcggagtttttattgttggcaataaccgcatcggctaatttttcggcctgagagaagttcttttcatcggcatacactttcatcagttcaacattggcgtaatttttaatattgacgtctgatgagtttttaatattttcaagatattttttagcttcagtcgtattcccctgattgacatagatttgcgctaaacgggtttgtgcatcatcctgataatcgttctgaacattggcaacttcctgtaaaaccaacagtgcttttgtagtatctttggtctgataataactttcaccaagctcatattttgcctgataaagcccttctccggtcggattctgcgttaaatatttttcgtagtaagaaatcgcgtttttataatctttcttcgtgaaatactgttttgcagtcgataagttaatttcatcaatttctgatgcatcaatattaacccctagatttcttgcgaaagtttcgtagccggaaacatctccgttctttgtaaagatcggttttgccgcctgaacgattttttcagcatacgctgtatttttatattgttctccaagcgatcttagttcagacaaagccttatcattttggttctgatcaatataattttgtgctctgtaaatcgatgcattggcaaccaaatctttatcagaagaagttttaatcactttgttaaagtaatcattcgagttactgaaatcgtcctgtgctgcgtaagctgtcccgatttcgtactgcgcatcatcataataatcagaatccggatatttggataaaaggtttttcaggttggtaattttcgcctgagtatcacctttaaatcctaaagccattgctttctgatacagtgtataatctgttgcgtcttcatttttatcataaatggcaatcgcttcgttcaggttattgtttgcgtaattaatatctgccaaacgaagttctacatcatttttaaactcaggtttcggatttgctaaatattgcttaaaatacgtttccgcctgatcgaattttttagatttgaaataagcatagcctaaatcataaggaagctgctgcttttcagggaaattttcgcccagtaatttttcataacgggcgattgcggaaggataatttcctttctgataatacacctgtcctaaccaatataaagctctgttgttgaattctttattgatgttaaatcctaaacttcttaagaaataattttccgcttcatcataatttcctttgttgaattcttccgttcccaaaagataagaaacttcctgatcgatcttattgatttccggcgttgagctctgtaaacggtcaatcgcgttcagcgtttccttataatttccggaatataaataggatttcaccaaaagcgatctcatttccgaagcattcgcgccgttttggttttcattaatataattctggattaccgtcgaagcgctttcaaacggatttccgatgtcgtagcttaatttagcgtattgttcatgcgcaagctttttcacattcttatcataattcatctgatacgcagaacggaaagcagaaagtgcttcctgttttttaccaaccgccagataagcatttccaagctgataataagcattctgagccaatgcagaattgctgttcagtaattgattgtaataagaaactgcttcgtcatactttttaagctgagccgctacaaatcccatctcataaagatcgttttcagacggattttgctgaacgctcagataatcttttaaatgcggataagccgaagtgtaatcatctttcatgaaataactttcaccgatgatcttatgaacttctgctttgtaagattccgaaatatcttcgttcagtaaagcagttccttcggagatcgctttatcataatctttgtcattgtagtacatctgaacatagtaaggacgcaccagtttagaatatttcggttcttctttaatggaatcaaaataacggaacgctttatcattctgtctgttggaataatataaatgtcccaacatataagcaatatcgcctttttgagactggtctgctgttttataagcttcttccagtgcatctgttgcgcctttagaatcgcccatcatgaatttggcatagcccagtttcagaatgtattgtgtattttcttcttttgaaagctgatactggtttacttttttcagagtttccagagctttggcgaaatcttttttagctaaataataatcagccaacggtaaatttgcctgtgcaaaatacgcagagttcggatactctttcatgaaagcggttaatccttcttccgcatgatttttctgaagaatgacgccgatcacgttatcaaaaaactgcgcagcttcttttctcgaacgcgacaaatgctgattgtagaaatattgtctggcgtattcgtattgtgaagcgttgtatattttggtctgataaagattttcagcgagattgaatctgtagttttctttttgggtaaagtactgagactgttgcgcatcggagatcccgaaatacattacagcagccgctaaaagtatttttttcgatttcattaattttaaattttaacatgaagaagcctgaaaatcaggttcagatatttaaaattacgggaatttttatccacaatttatcaacgaaaatattgaaaagatattttataagcaagcgttttaacacattgttagtaaccaaaattttttttaagacttcttaactttttgataagaaagattaagaaaataaaaattatttcggagaaataattacatttgcttttttcgaatcaaatatagaattgaatgaatcaactttttagaagaaaaatctattcagatacagacacatctacgagtttattgagggttttgggtgtttgggacatcgtattttttggtattgccgccatcatcggagccggaagtttcagcagtttgggcgaagccgtcttcagaggaggtcccggtgtgatcttattatatttgatttgtggttttgcgtgcggttttacagcactttgctacgcagaatttgcgagcaggatcccgacagcgggttccgcgtatacttatgcctacgcaagtttcggggaattaattgcctggatcatcggctgggcgctgattatggaatattctttcgggaatatctacgttgccttttcgtggtccgattattttacaagtttcctgcaccgcttaggaatgcatattcccgactatcttacgtgcagttataccgaagctaaaaaagcttttatgagcggttccgaaaacaaagaacttattaatgcatggacgaatgctccgttaataggaagtttaaaattcatcgttgatgttccggctttggtcatcaacggattgattacatggctgtgttatgtaggagttaaggaaagtaaaaacttcaataacgctttggtaatcctgaaattagcggtgattgttttggtgattttagtaggatttgcttacatcaatacagataattggacgcctttaaatccggaaactcaggttacttctttcatgccgaatggttttgcgggggtaatgagtgcggtttcgggggttttcttcgcttatatcgggtttgatgccttaagtgtgctttcggaagaaacaaaagatccccagaaaacacttccgaagggaatgatcatttctctggtattgtgtacatttatttatattgctttaacgctggttcttaccggaatggtggattacagaaaattcgatggggtaggagatccgctttcctttatttttgaaaaaggaaatgccaatgttgcatggatggagcttgtcgtttcgtttgtagccattgtagcgattacaaccgttcttttggttttccagatgggacagccgagaatctggtacgccatgagccgtgacggactgatgccgcagaaatttcaggaagtacatccaaaatataaaaccccttcgtttgcaaccttggttacagggattgttgtcggaattccgattttgtttaccgataaatctttcatcctcgatttcacaagtatcggaactattttcgcgtttgttttggtttgtgcaggagttttaatgcttccggcaaaagaaaagatcaaaggaagatttcatttgccttacatcaacggaaagcttattttccctcttatttttattggcggattagtggttttctatttctggcagcctgattttttccataatttaatggactggaaagatcctaaagaaggtgaattcagagcttctattttcttctttattctggttaatttactgctttgtgtattgacgtttattaaaaatctatctctgattccgttaatcggtttaagctcgtgtttatatcttcttaccggaatgagccatgacaactggttctggtttggactgtggtttgctataggtttggtaatttatttctgctacggataccgaaacagcaaattgggtaaagcttaattgtatgatgaaatatctgcttgttttttcgcttctgatattgggaggctgtaaaaagacatctgatcatgaaggcaattcccaaagaaaccgtacagaagtaaaacggagttataaggaatgtttaacagcaattcatcaaaagacagaagcagagaaaaagcagtatttttttaaatttatcaataatgatgttcctcaatactgggcaaaaacgccatggtcttttgcaggaacttccagagagccgaagaagggaagtattgcctgcggatattttgtaacgaatactttatcggattacggttttgatatcaacagaacgtatcttgcgcagcaggcttcttctgtaatgattaaaaagctttgtacagagataaaatatttcagcaaaagacaggatctggagcattatattttagggaaaaataaaaatcaggtatatcttgtaggactggattttcatacaggttacattacccgcgaaaacagagacacttattttattcattccaattacatcaagaatgaaggtgtaataaaggaactgactaaaaattcacgtgcattgaatgcttctgaaacttttatgattggaactttaaagtacaaataatcatgtctgaaagaattaaaaccttcaaagagttctatgagttttatcttacggaacacagtaaaacaggaaccagaatctttcattttctgggcacattgcttgtcttttttgtcataggatatgttatcagctccggaaaagaacggtttctctggtacgtcccgatcttcgggtacggattcgcgtggttcagccatgctgtaattgaaaaaaataaacctgcaacctttaaatatccgctctggtcgctgatctcagatttcagactttttttcgaactgttgatcgggaaacagaagttttggggagtttcagataaaaaaactgctgaaaagtaaattttaagatcatttcacggcacagtaattgcaaccctgtcctaaaattttatttatgaaaaatttcacaacatttttaaaagtaacgttttcggcaatttttgttatgattcttacacaatgtacaacttcttccaacgttgctgctgcgaacgaaaaaacatttattgtaggtcctgaaaccgcagactgcaccggagttgcacccatgaaatgccttcaggtaaaagaaaatgcttcagattcgtggacgaatttttataccaatatcgaaggttttacttatgaaccgggttacgaatatgttttaaaagtaaaaacagaaaaaatagaaaatcctccggcagacggatcttccataaaatacactttgataaagcaaatatctaaaactaaaaaataaacaataaaacctccggaatttccggaggttttgctttatctgttgttgtttgtattgtgatcgtgatcattcggcggtttgggataatttcctttggttgcttctcctacggtattggcagtagtcatggcaacaacaagatcgttcagcatgccgcttgctgcggtgggcgaattgggcagtaaaacaaggttgcttctgttgcttgctcctacagaatgaagcgtgtcataatgctgtgtaacaacaataagagcagatgcttcgtgagagttgatatcaacgttgttcagcattcttacagactcttcaagcccttttgcaatttctcttctctggtctgcaataccttgtccctgcagttttttagattccgcttcggcttttgccacggctacaattcttattctctgggcttcagattcgtattctgcggctgttttttctctttcggcagcattgattctgttcatcgcgtgtttcacctgctcatccggatcaatatctgtaaccagagctttgatgatatcatatccgtaactctgcatcgcttcctgaagttctgcttttactgcaatggcaatatcatctttttttaagaatacatcatccagttttaatttcggaacttcggctcttacgacatcaaaaacatatgatgtaatctggtcgtgcggactttccagcctgtaaaaagcatcggcaacctgagttctgatcacctgaaactgaacggaaatcttcattttcacaaaaacattatccagagtcttcgtatcaatcattacatccagttgctggattctgaggttcattctttttgcgatcctgtccagataaggaattttaagctgtaaacctgcatgacggacggaatggaattttccaagacgctctacaatggctgcagtttcctgtttcaccgtgaaaaaagaagcaaataaggttaccaatcctataaaaacaataattcctaagtatgtcataatttgatttttttatggggtgtaaattttttaattaactgaaaaacacttatctgtgtttgtttaaatatataaaaaataatttaaacgttaccgctatgacaatcaacagttgatatgcacggagaaaaaagaaatttacggtgagttcaggacataaaaaaacttcaacaattttaaattgaagaagtttcttatttttaaatcctaatagtcgtttttgtataactaaaaagcaattacaccgtcattccgatgtcgattcctttaattttacggtaaagatcggttgcataattgtcggtcattccagaaacaaaatcgatcacacccagaactttctggtaatcggttccatcgtcgtatacaaactgtttaggcaaaagttttaaggcttttttgtcgtaagattttctttcatcatgtgattttagaatggagggaataaaatgatccagcaattcgtacattacattataacctgcattttcaatttccaccaccgctttatgattgtagattttttctattgagaaagattcaatatcctgtaaagcattattttcagacttataaatatccagaagacctttttctaaatttccttccagaatggtattaaagttatttttataaagctcaatcgatttgttgattaatgcattgattactttggctcttaaataagaaatctgttcattttcatttcctatggaatccagcttgtcttttacccgttttatatcgtctgtttcagattttaccaattcaaaaaacaggtttttgcagtccgcggtagaaacgattcccaatcggtgcgcatcttccatgtcgataatattgtaacagatatcatctgcagcttcaaccagccatacaaaaggatgtcgcttaaaaatataaggttcttcgctttctgaaattaaattcgtgccttttgcaatttcaatgaaaatatctttttcgttctgaaagaatccgaactttttacggtgaatgatccctttctttttagctatggcttcacacggatacttggcgatacttgccaaagtagaaaacgtaagctgaattcctcctgcatcttttccctgctgttgttgcgccagaactcttattgcattcgcatttccctcaaaattcaccagatccgcccattctttttcgttgaatttcggttttaaatcagattcatttctttcaaaataactcgcaattgcatcttctccggaatgtccgaaagcgggatttccgacatcgtgacacagacacgctgctgcaataacatttcctaaattatgaaggtaaaagtttttggaatcttcagtaagatcatttttaaattcgtcatgaataaactcacccattacacttcccagacttcttccaacggacgaaacttccagtgaatgcgttaaacggttgtgtacaaaaacacttcccggaagcggaaaaacctgcgttttattctgcagtctccggaaagccgaagagaaaataattctgtcaaaatccctctgaaaatccgttcttgaagcctttgtctgtggattgtttccggtacgctgattcgtgaaaatctggtttaagttcatcatttttcaaaattacttcaaattttattttttacgaactaatcggaaggatttttctgaaaaatatcgtgtttcaactcctgtttttccgtaaaatacctgtaacattttgcagattttcatcgtaattttaggatcattaactccaaaaaactgaaatcatgtccgaattttttaaacaaatccttggaagcacgattgttaccggatttttcaccgcagtaatcgcatatttttttcacaaaagaacagaaaaatacaattccgttttgaaaagggaatttgaagcgttatcaaaaaaagatacggcttattttgaatggcgaaaaaataccgtagaattgttaggacaggtttacattcatctgaaccgtttaaagcttgcttttcagaacaaatattctaaaatacagaaatatgacggattctatgaagatgaaattattttaaaatccaatcagcacatcagagatctgctcatcaataacggtcatgctttgcctcctgaattactggacgaagccacaaaactgatcgaacatttcgatgtctggttaacaaaatacaatcaaacaagagttttggataaagattttaattcaaaacaaatttacgtgggacccgatggtttccgctttcctgaaaatgccgaaagactgttcaaagaaaaatatgttgaaatgtttaatgaattgcatcgggcttaatttttttcatggcaaaataattgttgtgtacattttcaaattcatatgctatgcccgaaggtccaccaattgttctgatgaaagaagatctgcagaattttgcaggcgaaaaagtaatggaggtaaaaggaaattcgattactgaaactaaaggaattaaagatcatattttacgcgaaataaaaaccttcggaaagcagacgtttttaatttttgataaagcgaatatccggattcatttgctgatgtttggttcttacagcttatttgaaagaaaagatcaggcgcagaatcttcgtctgggcttaacctttaagaacagtggaatgtacttttatacctgcaatgtaaaaacggtaaaagataaattcttaaaagatatcgattgggaagtcgatgtgatgagcgatctgtggaatcccgaaaaggcagaggaaaggatgaaagcaaatcctgaaatgatggtctgtgatgctttgatggatcaggatatttttgcgggagtggggaatattattaaaaatgaggctttattcagaattggagttcatcctgaaacttttattaaaaatttaccttcaaaaaaattaaaggaactgattgcagaagccagaaattacagtttcgacttcaaaaaatggaaaaaagcgaatattctgagaaaacattttgaggtatatcatcaggaaaagtgtccaaaatgcggtctggaaattgtgaaaaaagaaaccggaaaagggaaaaggacgagttttttctgtgaaaaagatcagaaattgtattagaaaaattaatcagccatgaaattcatttatattttaattcctcttgtgttgttttcctgcaaacagtatgaaattgacagaaactgttttgaaagcggaaataaaaaagaacctcaatacaaagagtttgagttggatcagcctgaaaccattatcaaatccaatccgaaacatgtaaaattttctgtcgatgcaaacgttaaaagttttgaggaagaacaggatgaaattaatagtaatttctttgatgaaaaggaaagcaaaaagcggatagatgaatatgacctgaaattttctgaactgaataaaaatttcggcgatcagttttattataaaaatattcagaaagaaaatggtctgatctacggaattggtgaaaaccagttcggatactggcttcttgaaattaaaaacaatattcccaatgcttattatctggggttgagtaagtttatctatcttaataaaaatcagcctgaaatttttgtttccggaaacagcatcatactttccggaagttttgtaagaataagcggaaattgggcatatcccgaatctccatcaaaagaagctgtaaaagaccggctggtttttgatattgatctgaaagaagttttaaaagacagcgataaagaccgctttaatgatctgtttgaaaaactaatcttattaaatccggattcagcagatacggataaagacggaataagtgattttaccgataaaaatcccctgtacaaatctgaaaaatcaaagttttcggatctgtattctaaaattgtgaatgacgattatgaacagtttcatttctctgaaagccattactttttcacaggatatttttcagactgcgattatttccaaaagataaatcctgaaagcatcaaagttcttatttatcctgaaaaagaacaatctcatttagagtcagattatcgtctcgaaatgtttcctgattatatcggaaatattaaaaaaaccgatgataaagaacggtttctgattgattacggaagtggattgggcggcggatttatagaagctgttttcacaagcggtaaatggacattaaaaaagacacagacgatcgtgatttgatttatcaatctctggatctgattcctctttataattgagtgagtttatatgttctaattttatcattttcctatatcatccggaaaaaattgtagcaaatacctattcttctttaaaaatctctgttatgttaacagaaaatcagaaaaaatactatcatttttcgtcctgaaaaaaaactgctattctgtttattctaaaaaattttattcaaaaaaaatactcgaaaatgtgccttgtagagtttctatgctaacatttcttaatattgtggaggttgaatgtcaaaaataagtgagatattattgtccccgaaaatgttattatgtattgcattttttcttttttggattatcaacttttaaatacaagctgtaaaatatttaacagattaataattttttacacataaatcaaaaaaagccgtattattttttcatttttatattaattatttgtaaactatttttgttataatcttaaacaaaaatcgcttaaaacactgatatacatcatgattatttattttggaacgttgtttgaaagtcgtaatattgcaaatgtaaaattgataataaatagtcaaataattaaaaattaaacaaaatgatcacttacatcggaattgcaacatgtttagtagtattcgcctcttattttgcagcagcaagaagagaaagaaactaatttagaaagttctgaactggagaaattcagtttctgaacacaagacgaaattatattgttatatgttttcaatctgcaaagattgactgctcttttactcggcgcgagtaaaagggcacacaaaacataggacaagattttacactaaggaagacaaattttaatttttataatagccgatagaaagtcgaacattcatttgttcggcttttttgttgtataacctttatctttgcatataattttcgcaaaatgaatctgtacaatcttattattcaagacaaagaagaggttacccttaatgatgttttccttgatcccaaaaataaagaacagcttgtacagcttattaaagaaaatacattttccaaagagcttctggaatacggacttccggtaaacaacaaaattcttcttcagggaagttctggctgcggaaaaacaatgaccgcaaaagccgttgccaatgctttgggaaaaagcatcatcatcctgaatttaagcaatatcgtttcctccagaatcggggaaacttcccagaatattaaaatgatctttgataaagcggcaagagaaagatccgtcctgttccttgatgagctcgaccagataggaaaagcaagagggagcgacgataaagatgtgggcgaaatgagacgtctcgtaaatactcttattcagttgattgattattttccggaaaacgcgctgcttttgtgcgcgacaaaccatcctgaaattatcgacacggctttattaagacgttttcagcttaaaatagattatacactgccttcaaaacaatttttagatgatttttacgacgatttgcttgtgaaatttcctgaagatttgagacatattgaaagaaaatatgatgtttcttttgcggaagcgaaagatcatgcttttacggtggtgaaagggaatttgattaaatcattggaagctaaaacggaaaagatatagtttgctaaatgaaatcaggatttttttcagtttttctgatgtttttgctttcgtgctctgaaaaatatagtggagaaattacttttaaaaactgtaaagtcaactatcctttacatgatgaggaaaaagaaagaaaaattaatgatgaagctgttacaaatcaatgggagtatgagtctgctttgcgcgaattagcactttgcttgtgtgatgaatacgatcggaaacctactaaggaaatcaaagataagattattgaaatctacaagtataaattcgaatattataacagaaatgattcttttgagaaaataaattttgattctattttaatgaataggaaaagaatttttgatccggcaatgatcattgattaataagatatttgattgtccgtttattaacctaaagcttcgacaggctcagcttgacatcgctagaaatcaagcgtttagtattataggtgtcacactgagcttgtcgaagtgcctgttataaataattgattttcatatcagtgtatagtaatagcttgtttaacgtatattcaataagatattgttttatatttagaaattataaataaacggctaataaattcacaaaattcactctaaactcaataactgaaaaaaaatagcagaatggaattgaaattgatcagaaaagaaatcaaaggaagacagattgaagtatatacagaatcgaaaaaatttatccttgccggtaaaaaaggggatgttaaaaatatgcttgagaattatggagccgtagtgaaaaaatttaacaaagagcagcatgtttatttgctgattgggcgggatttttttgtttccggtaattacagttacatcaaccgcaactatctttttgaagatgaactgctggaaaatcacttatcactcagctttttcccgaatcttaaaagagatttctacaacatgatccgaagtctgcttcagcgtgaagatctgtacatacactatttttcgatcggaaaacctctaagcaatgaggattttgaaaaatatgagaaaaaattaaaacggaaaactccttcggccgtcaaagaattttacagcctattcggtcacattcaaattttatgggattataaggaaccttacgtggacagaagggtaagagcgggtaaagcttggaatttagatgcttgcaacaatcatatcggatccattcagatactgcctttaaaaacggttttatttgaaaaatgggatgcgcatttcgatgtggatgatgacctgaaaatatttgatttttattcggagtacaatatgattgctttagatcttaattctgatgacgatccaactctgtataaaggagataactacggcaattcttttacagaccattctacaatgagctttactgattatgtttctttaacgttaaatctccacggcttgagagaaagaggaggttattttgtacatttttccagcaataatcattcaaagaccaaattaggagatgcgattaaaaaatcatctgaaataccttcacgataaattgaaaatcttagaattatataaaagttttcattaaataatagctgaaattaaacatttttaatactttagggctctaaatttaaaactaatacgctatggcaatcaattttgcatcagaagaagagaaaaacggtttctgggaactttccaataccattcaggcaggagactacgaagaagctttaaacctttccaaaaatttactcgaaaaatttcctgacaataaagccatctaccataaccagatcggcgcaatgatttatctttccaagaatgattactggggtgcaacatcgcactacaccaaagctttagaatatggttttgatgcggaagcctgtgaagataatatctgggaatctgcggtagattcttataaattccttatcgacagtgaagaaggtttctgttcactgatgattaaagacacacacgaatttattgccgccaatgatttaattaaaaaatacgaaaatattttcccgaatggaaaatatgcagatgaagctaaagaactcaatgacatttttaatttgacaaaggaattgcagggaaacaataattatacttcttcggcattgaagcaaaactattcggaaaactatccggatggaaaacacggcgaagtggtgacggctttgtgtgaaataattgataacaatacataaataaccaataaaaattactacatgagtacattatggaaaattaaggtcatggaaaagaaagatgactatattgacttgcttgttaaatttagccatccggatgcaggcccctttcctcaggataaaaatttcgccttacagcttttgattcatgaagcctatggttttgatgaaagttttaacaggtttcctaattctcctcttggaaaagctatttcccccgataaatttcagccggatgatctggatgatttggtagatctttatgtaaaggataccattatttatgaggctcagaatcttccttgggatgaaagtgaggcgcatgcacaaatggacgaattatgtgaaaaggacgggcttgaagaagatgatgacgattgggacgaaacctgggataaacactggagagaattttggaaagattataatagaattccgtgggctatttatagaattactacaacggattctcagtggactgatcaccttgaaaagtatcaggaattcgattctgctgcttacagcaacggttacaactctgtagatagaaatataaaagttgatgttaccaacccgtgtcaaatctcagattatatttcatcagaaaagcaagagtcatctgaagtgtttgattttttagaagaaatggctgatcaacaacctattctaaaaaagctttttggcagctttttttaaaaataactgatgctgctttacttgtaaatcttttgaaattacttttaaatgacataaaaaatccctctcatcactgaaagggatttactgtatctaaaacttttaattacatataagcttcaatcggctcacaggtacaaactaagtttctatctccgtaagcttcgtccactctggaaactgtagcgaagaatttgtggtctcttacccaatctaaaggataagctgccttttctctgctgtatggtttatcccaggaatcggagattaccaattgttccgtatgaggagcgtttttcaatacgttgttggctgcatctgcttcaccatttgcaatctcatcaatttcctgtttgatggaaattaaagcttcagcaaaacggtcaatttcagatttgctttcagattcagtcggctcaatcattaaagttcctgcaaccgggaaagaaaccgtaggagcgtggaatccatagtccattaatcttttcgctacatcggcaacttcaattcctaaagatttgaactgtctgaaatctacgatacattcgtgagcaactcttccgttttcgtttgaatataaaatcgggaagtgttctgctaaaatttcttttaaataattggcatttaaaatagcgtgttccgttgattttttcagacctgaatttcctaacattttgatgtaagcgtaagaaatattcagaattaatccagaaccgtaaggtgctgcagaaataccttcaatcgcatcttttgatccgattctgatattggcattggatggtaagaaaggaactaagtgtttagccacacagatcgggccaactccgggacctcctcctccgtgaggaattgcgaaagttttgtgtaggtttaagtgacaaacgtctgctccgatgtttccgggacttgtgtatccaacctgagcgttcatgttcgctccgtccatataaacctgtcctccgtgttcgtggatcaaagctgtaatttctttaatgttggcatcgaagaatccgtatgtagacggataggtgatcattacacaagaaaggttttcagaatgctgttctgtttttgcttttaaatcttcaaaatcgatttctccgttctcaaggtttttaaccacaacaattttcattcctgccattgccgcagaagcagggttggttccgtgtgcagactgaggaattaaaaccacatttctgtgaccttcacctcttgaaatgtgatattctctgatcaccattaatcctgcgtattctccctgagctccggaattcggctgaagagaagttcctgcgaaacctgtgatttcagctaaatctttctccagttcacggatcatttcctgataacctcccgcctgatcaactggtacaaacggatgaacagaaccccaattgtcccatgaaagtggtaacatctgcgttgcggcgttcagtttcatcgtacatgaacctaaagaaatcattgagtgggttaatgataaatcttttctttcaagacgcttgatgtaacgcatcaattctgtttccgtatggtatttgttgaatacttcttccgtaagaatttcgtcttttcttaaattctcttccggaatgctgtatccttctttaatttctaatttgaaagtctgcttatctttgaactgggcaaaagaagccatcagataatttaatttatccaatgttgtactttcgttgatcgcaatacttacaacgccttccgtgaagtagtttaagtttaatttatgatcaagcatcattctcatcagtcttcctttctcatcttcattcatcgtgatttttaccgtatcaaagatcggttcttccacgatttcatatcctaaagctttcaggcctcccttcaaagcattggctttgaaatgaatctgatctgcgatataatttaatcctttcggaccgtgataaacagcgtacattcctgccataacagccaaaagaacctgagcggtacagatgtttgaagtcgctctttctcttttgatgtgctgttctctcgtctgtaaagccattcttaaagcacgtcttccgtacacatcctgagaaactccgataattcttcccggaatatctcttttgtagtcttccttacaagagaaaaatgctgcgtgaggaccaccgtaacccaatggaataccaaatctctgcgttgttcccactgcacagtctgctcccattgaagccggagattttaacttcaccaaagccatcggatcacaggcaacaactacctgaagatctaattttttatagtcaacgatgttttctgtataatctaaaacaattccgtttttcccgggatattgtaataaaactccgaagtaagaaccgtcaaactcatgcgttttgtgatctccttctacgatttcgatctcaagaccttccgcttttgtttttaatacagaaaccgtttgaggcataacaagatctgaaacgaaaaatttattggctcccgcttttttctgatctttcgttctgttgttgaagaacatgtgcattgcttctgcagccgcagtagattcatccagtaatgaagcgtttgccaaagcaaaacctgtaagatcacacaccacagtctgaaaattaagaagcgcttccagtcttccctgtgcaatttccgcctgataaggagtatatgctgtgtaccaactcggattttcaaagatgtttctctgaatagccgatggcaacaacgtgttgtgatatccgaacccgatgtagcttgtataatcagtgtttttcgacgccagttccttagaatggatcagcatttcatattctgaaagcggttctgagatttcaagatctttttctaaacggatagaagaagggatggtttgagagagaagctcctcgatacttgaaacgccaactttttccagcattgcctgtttatcggcttcatttaaggaaatgtgacggctcacaaactgttctgtattcatttttatttattagattttgtttgtaaaaaagattcgtaaaattacgattttttagaaaattgtacaactaaattaaaatcataaataaataatataaagtattttaacttatttaaaattaaagcctttttgttgagttattgaacataaaatctgttaaaaaaagcagttgagaataaattttactgccagttaaattttctaaaatttaaaaataatcaatattacaagtacttatttttaaactcaccaggttttataattatttaaatgttaaattttccaaatctgtttaccgaaattcataatattatcaattaaaaaatcctccaaaatttaaatttggaggatctatttatagtaagacaatgttaatttattgaagattaggctgttttatcaaatcttcaatcttcacaataacatcatcaatatcaaaaggttttgggataaaaacatccgctttgcaggagtttacaacgtttgtcgcttttgcatgagcgctgataatcattacgggaatatgagaggtcgcgggattttctttgatctggttgcataaatctgttcctaaaccatccggtaatttcacatccatgataaaaatgtctggaactacggattgatctctgttgttaaatgcttcagcattggcgaaagaacgaacgtcataattctcaaatgacaggagtagctgcaatgcatctctgatgcctgtctcatcttcaacgataaaaattgttttcatatccgttgcatcgcaaaaacaaagccaatcttaaacgaaatcttaaattaatgaaaaattgaagatcaattttatctgattcggaataaatcggttaataatattcatcgatataagttattttcttaaaggaatactttttgtaatctctgagaaacaaaaccacaacttaaaatatatgaaacactattttctacccatgttaactttgctgacgttgagctgcaaagaaaataaaacagaaaaaacagagggcaataccgccgttaccaaaaccgatacgctgaagcttcctgcaccggatgaaaaaaacagcaagacaaaattcagcaacgtattgggatggtctaaaggaaaagcgcctgttgctcctgaaggatttaccgtgacaagatttgcagaaaatattaaaagccccagaaatatgattcaggctgagaatggagacgtatttgtggtgttgtctaattctgaacgtaccgtttcggagaaaattaaaaacgacattagtggaaaaagtgatgctgaagtaggaggaaaatctgccaacagaatcattctctatcgtgatgccaataaagacggaattccggaatcttccagcgtatttttagcgaatttaaatcagccttacggaatgttgattatcaatgatcagttttatgttgccaatacagacggattatgggtctatccatacaaactgggagatacgaagattacaaaaccgggaaaaaagatcgtaaatcttcctgcgggtggatacaacaatcactggacaagaaatctcattgccaataaagatcagtctaaaatttatatttctgtaggatcgggaagcaatgtaggggagaacggaatggataaagaggtgagaagagccaatattttagaagtaaatcccgacggaagcggagagaagatctatgcagcaggtctcagaaatcctgtcggaatgagctggaatcctgtaaccggagaactctggactgttgtaaatgagagagatgaattaggagacgatttagttccggattatcttaccagtgtaaaacagaatgctttttacggttggccatattcttacttcggtaaaaacgaagatccgcgaagaaaaggagaaagacccgatcttttacagaaaacaatagttccggatgtacctttgggaagccataccgcatctttaggtttaacattttatacgggttctcagtttccggaaaaatataaaaacggagctttcataggacagcacggatcatggaaccgctcatctttggtaggatatcaggttgcttttgtcccttttaaaaacggaaaaccttccggttcatatcagccttttcttacaggttttatagcaaatgaagcaaaaggcgatgtttacggaagaccggttggtgttttgcagatggcagatggatctttactggtcgcagatgatgtaggaggaattgtctggagagtatctcgtaaaaattaatgaaattcaatagagtgtcagaaagcagtcattcagggcagcttttttattaaccacatcgttttcatagcaaataaaaatagagcctgaatgatcaagctctatttatttgatttaaaagttcttttagcttccgtaaaatattttacaatgctttgctgttaagattggtgtctgcaacttttgtaagcagctcatcacactttttttcttcttctaaagtacttagaagatgctgaaggcactctttttcttccagtacttttgcgaaagctgctaaagttccgtaggtggcaatttcataatgctcaaccttctgtgctgcggcaataattcctgcatctcttacaggtcccggttctgtttcttcaataatgctttttccttcatccagtaaaccctgcatggcatcacattttttagcttgagcttttttgcctaaagctttgaaacattcttccagtctttccacatgaccttcggtttcaactatatgattttctattgcttttttcagcttttcatgcgttgcatttttcatcatggtaggcaaagctttcagtaaagctttttctgcccagtaaatatcttttaaagaatcctcaaaaagatctttcagctcttttgctgcatttttctttgcaggcgttttagaggttgcttttggtgaagttttggcatttgattttgctgcgttttttgttggggctgattttttcgcaggtgtttttttagttgcggtcttcgtttccataatatactattttagtgtttggttgctgctgaatctgcaactataagaccactttggctcaaaacacacaactgtggtatgaaaagatcagacgaagatttttctgttgatgattttcaaataattttccttttcaagtcttttcacgactctcaccactgtttcgactcttaaagcagtaatagcggcaatttgctgtcgggtcagcggaacctcataggaatatttggactggtcttcataaaaacttttatgataatctaaaacccccacaattcttgtttccggacgaagagacgaattgttttccagcataatatatttgtaataaagtctttcggacaagaatttgttgatgtctcttgaaatttcaggattctcgtcaagaagcttttcaaaacttctttttgaaagttttaatacagtacatttttcaaaagttattgcgtttacaggataagtctgatctataaacaacaaaagttcgcatacactcagtcccctgtccagaatggcaagaataagttccctgccttcatcattgtaatggttcagttttattctgccttctacaacctgataataatacttcggtttttccccttcattaaaaatggtttcattacgatcaaaagattcttcttctgcaccgtagtctaataaaagtttttcagatattaacatatatagaattttgtgatttaataatggtatttccggaaccggattgattaaattttaaaataaaaaatcgtaccattatgacgaatcacaatctccgctatctgatgaaaattacgctataatttgtattacatgaaaaatgtaatgtatgacaaattaaaataaactgaaaatatgtaaaatagcacaaaactttcaaacaaaataaaaatgtctgaaagtttcagtagttttaaatttttagattgattatatttctgagttccttttgtgggcaaccaaatccattacttttccaatatcttcatttctgtactccgagtatacgtgcgagtgaaaatcattcagctttctcagtaattccagaagttcggttttttctttattttccagttttccggcaagaattctcgacgtcatatttaccttttcaacggaacggtggaaataatcttcacctttttcggtgatgttgagacgcttgcttcttttgtcttcgctgtcgttcttttcttcgattaagccatattccagaagacgtttgatgatttgggttcccgtctgtttttcgtgcccgtttctttcaatcagttgaattttagtcagattaggctcgtctttcagtcggtagagataggtgaattcttcattggcgagttcaggaaaatcattcagtccctttcggatcagttgtttagaatatcgtcccaaaagcagaacctgtttgcagatttcattttctgtgaaagaaacctgatgctgttcatttttaaaaagcttggtcggactctcttttctgtattttttatcattcagccaaagacggaaatcctcaaccgtagagtgaggtctgtaagcttcggaattttcaaattctttaacctgatgcagcaagtcaatgaaaaaatcagtattcatagcgcaaatttaatctaagtattttaaatattttttataatctaataaaggggtttaagaatctaaatcctccaacgctccaactctccaaccctccaacgctcaaacccctcaaactctccaaccctcaaactctctaacactaaagtttcacacttcccattccaccatcaattccgaaaacctgtcctgtgatccacgaagatttatccgaaacaagaaatgccgtcatttccgcaatttcttcagccgttcccactctttgcaacggatgtctttttgcagaggcttctcttttttcaggtgttgccaatagctgtgatgctaaattcgtgtccgttaaagaaggtgcaatcgcatttacccgtattttctgagccgaaaattccgccgccagacttttcgtaagaccttccactgcatttttactcgcggcaattgaagcgtgaaaaggcatccccaactttgccgcaacggaactgaaaagcacaacagaggcactttccgactttttaagattcggcaacagtttctgaataattttaaccgctcccaaaacattgatctcaaaatcattcttaaagtcatccacagaaagccggttaaaaggttttaaattaatgcttcccggtgcataaaccaatccatccaccacttcagggaaattaatgtcatctaaatttcccgaaagaatatccattgtgtggaattcaatattcggatgattcagttcaggattttccgttctggaaattccaatgatcctattatgttctgcaagaatttttgccgttgctaatccgattccctttccgcaacctatgatgattatatttttcataatgatttattttaatgttttgaacatgatgtttactacgttttcattttgagacacttcgacaagctcagtgtgacatctttaatactgctcatttaataatctgcattgtgagactaatcttgttaagatttttatttacaatgcttttttgctcttttgaagcactctatcttcaaacaattcttttgtgacttttgcggttaaatcaactaccttttcgagattttattattgctgataattctctgtctgctgcatttaaagcggttgatttcttcgcttctttttttcagatgtttctggcttactcccgaattcactctttttctccaaagtttaaaactcgattccttcagttccgaacgcatcagttcaattacttccgattcgctgattccgaactggaattgtatcgcttcaaacggcgttcggtcttcccacgccatttctatgattctgtcaatttcttttatgttgaggtttttattcattttttttgatttttaacgcaaagtccgcaaagatttttctttaaaattttgaaaatattttttgttcgcaaaggcgtttcactcagcaaagtctttttatagaatcttttttgctcttttgaaaaactttttaccaatcaattcttttgtgtcttttgtggttaaaatatcatttcagattttcaataaattccttcgccgttttaaaatgctgttttcgtttttcttccggcattttctccagtgttctcagcatcattcccaatcttggatttttggcaaaaaaatctttattgtcgttgataaagttccaaaacagagcatcccatttttcattccattctccatccggataatcgctcatttttttaatataattgcttccgctgatgtacggtttcgtgctcatctttccgccgtctgaaaaactgctcattccatacacatttggaaccatcacccaatcgtaagaatcaatgaacatttccataaaccattgatagacttcatccggattgaactgagcaagattcataaaattggcaaagatcattagtctttcgatgtgatgcgcataacctgttttccggattttctggagcgaactgtcaatcgggcggattcctgttttggcggtgtaaaaagactccggaagtttttgcttgtgtttccagtaatttttattccgctgatacgttccctgataaacataaaccccgcgaacaaattctctccagcccaaaatctggcggacaaaaccttccagagaatttaccggaatatcgtgatcttttgcaaacgaaatcgctttttccagcacattttcaggcgttaaaagtccgacgttcattaatggagaaagcacactgtgatgaaggaaatgttccttttccacgatgctgtcctcgtaaacgccaaattccagaaagcggttttcaagaaactgttccagccaattttccgcttccttaaaagtagtcgggtagagctgttcatccgtaagcgttccgtaattcttggcaaaatgcttttcggtatattgttttgcttcctcgtaaaattcattgttttttgggaaatgaatcgcgggcgcttttttatttttcggatattttttccggttttcggtgtcgtacgtccattttccgcccaaaggttttccggctttcatcaggatatttcgggtaattctctgctgcttataaaaatcagtctgatgacaggcttttttaccttcaaaataatctttcaggtcttctttgctgttgatgaaaagcggactatccaaaatttcgagttccagttttgtttcctttaatcttttttccagccagttgtcgcaaacatccgttgtttttatcgttgtaaaattttctttttcaagtttcggaattaaatttcggatgtcgctgaatttcgatgaactttcaacatattcaacttcaaaacctgccttttttaattcactttcataaaatttcattgttgaacggtgaaacgcaatcttctgttgatggaatgaatactgtttaaaaaacaaaaattcctctatcaaaaatacaggctgacttttatccagataatccgtatcctcaaaaagctgatgcggaaaaatcaattgggcggtatgttttactgctttagccataaacgtctgaatttttgattggaatcatagatttctgcctgtttttcagggttaaaagtccggtcacgattatcatttccgactccggcgagatacatccaattgccgtaattgctgtgaacatcataatcaatcagcatttcctcaaaataagccgctccaattctccagtcctgtttcagaattttgcagaaataggaagctacattctggcgaccacgattactcatccagcctgtatttttcagctcgagcatattggcattgacgaaatcggaatccgtttttccatccttccatctttgaatcaatgttttattgttttccgcgaaatgtttttgatgattaatcccgcttttccagaaaatcaaatctttatactgtaaagaaacatatctgaaaaaatccctccagagcaattcaaaaatcaaccaatacgtggattcattggctccgaattcttcctcatatttttttatctcgtggtaaatggttaccgcagaaaggcttccattcgacagccaagccgaaaatttcgaactgtaatcttttcccaccaaaccgtttcgggtttgcttgtattgactcagattctgcgtttccgaaaaataatgatgcaatcttttcaatgcttcattttctccgcccgaaaaaggaaaagcagttctttcgtccgtttcaaaatcttcaaaaccgagcgattttaacgaaatggtatcacttttaaaatgaatttccggtttgtcgtacatcaaatcttccgattcaaattcagggcggatcagcagatttttttcaattttctgccggaacgcggtaaaaagcatcggaattttatccaacgttttaaaaacaaaaaacggatgaaccagaaactgtgaatacgatttttcccaaatggcagccggaaccacacttcggatttttgtatgaagttcggtttcctctttcgtccattcttcctgacagaaaatcttcaagacttcaaattcctcggaaatgtctttgaaaacgtcttccgttttgccgtatttgactaaaaaaggaatcttatgtttcgctaaattctgctttaaattttctacactttccagcaaaaattttgcacggtattttccgatttttctggaaccaaattgtttttgagcaaaaaattcagcgtcaaaaacatacaccgcaaaaaaaggcaactcttcctgcatcacattgtataaggattctgaatctcttgttcttaaatctttggtgaaccagaggatgttgattttttgttttttcggcatctttcgctgcaatattttacttcgtcccagttttttttccactttttccgccagttgaagggcagtccgcagacttcacagattttggaaggtaatcctgaaggcatattttttatattaaactttaattcaaatacaattgtaatattaacaggtcgctcctacggagcttcctttttacggctttctattttctattaacagtacattcctacggaattttataatgttccgataggagctgactgttaattgctaatatttttataagatgagagctccgtaggagcgacctgttaatgattcatttattccaacaaaatcgttttcaaacctttcggctcttttaataacctgtaattcatcaaaatcttttatgacttttgactccgtcgaatcttcgatttgcggttaaatatcacttacaataatttttaaaattattaatcgccacgtctttcgcttttagatcgtgcatcatattatacaatccgaagaacgttcggttcagataaataaaatgtcgggaaccgcggttggtgttcattcctttcatatcacttgctttcgcatatttttgtcctaaatcagcaatttcctgaaagaatgactcatccgaaaaatcaaatttttcctgattaaaaggtcttgtaaacagttccagcaattcgtagaataatttggcaaaaaactctttttctttttctgaatcttctgttcgaagaatttccaacgtgaataatttctcacggaaaatctcaggattttttaaattttcttctttcgccagttcgaaatacggaatgtagaaatcttccggaatctctttgatacagccaaaatcgataaccaataattcattgttttccgaaatcaggaaatttcccgggtgcggatcggcgtgaacttttttcagaatatgcatctgatacatataaaaatcccaaagcgtctgtccgattttgttcaaatcttcctgtgaattctgtttttttgtaaattccgagaaatgaattccggacatccagtccatcgtaatgattttctcacacgaaaattccggataataatgcggaaattttacattcggaagatgattacattcttctgcaaagtgttgactgcgtttaagttccatattgtaatcagtttcctcaaacagtttgtcttctacttcctgaaaataagattcggaaccttcttttttgatgttgaacatcttcatcgcaatcggttttaccattttaaggtcgctcgaaatactttctcttacaccgggatattgtattttcacagccagttttttgccgtctttttttgccgtatgaacctgtccgatactcgctgcattaaccgattcggcggaaaattcatcaaaaatatcttccggatttttcccgaaatattttcggaatgttttcttcaccaaagcacccgacaaaggcggaacggaaaactgagaaagggagaacttctccacatattccaccggaagaatgtttttttccatactcagcatttgggcaactttgagcgcagaacctttcaattcttttaacgaatcgtaaatgtctgcagcattgtcctcattcaggattttgcgggcttcatcttcatctttcgttattttatttccgtaatatttcaggtaattgacgccgacttttgctcccgctttaagcaggctgcttgtccgttcaatttttcctgtaggaattttatctaatgttttcatttttaaattttatttttatgtgtttggtaatcaaagctcctttgggagctttatctgtgtagaaaaagaatttattttccattttaaggcactccgtaggagtgctatttttaattcatctttgaatttttagattgaactcctacggagttctcttcaacacaatattcgtaatttctacacagattccacacctacggagcgcactattctttagatcattatcattcattttcgcagccgaattgcctcattcttttatctttaattcttgaatcggctaatctcgaagtccgacctgagtggagctctttttgtaagactgggaaaagcattggcacaaaaaagcgggaatccttcgacagactcaggataaacttcgggcggaaatagctgcccaaataaatattagcttattcgaaaccaaaagccagttgccaatcgccattcatcaactcattttaaacttctccttccaaagaaactttccaaggtcgaaaacttttctcaatggctcgttgtccatcagttcaaaacccgtatcgatggttttttcgatgaaaatatccgttttttcaaaatcaggagaagtgtcttttttccaaaaatcaatggcggaaaccaaatggagccaaagtgcttcctgtctcgatttttcgttgaattttctgatatcttccttagctttttcaatcatttcccattcgttgaaatagagcgtattgacaaattgtttgtgcgtttccctaagattctgaagggttttgatgctctggattttattgcttcccaaaattgataatactaaagaacggttcatcgtcatattttcaaagaaaatgtaatacacattcaggagtttttctttggttgtcgcttcgttcgaggaattcacttccgaagcgagttccagagatttcgtgaaaagatgattcactatttctctttcgatttgctcgaatcctgagaaataatgataaaactctttttcctcaaaattattttctttcgcaaaaaggtaaacgtttttcggtttttctccgtgattcaaaagataatctccgtataattcaaatattttttcctgcgtgatattggcttgttcttgcataatagaatttatttattgacaaatttagtaaataaatttacatttaattaaaataaagtataaatttgtactatataaaccatttaatttttgaattatgttgacaatacaggcacaatcgaatatacctacagattttggaatgtttactgtttatgcattctcagaacacgaagaagactggaatccgcacttggtttgggtggcagaaaatacagatttcagcaaaacggtaaacgtgcgttttcactcggaatgtattacaggcgagatttttcattctaaaaaatgtgaatgcggacagcaattagacgcggcaatgaaatatatgtcggaaaacggaggaatgattatttaccttcgacaggaaggtcgtaatatcggaatcatcaataagttaagagcatatgcgcttcaggaaaaaggttttgatacggtggaagcgaatttgaaacttggtttgcctgcagacggaagaaattttgatgtagcggtggaaatgcttaaaattttggatgtgaaagaaattaatctgctgaccaataatccggataagcttaaatctttggaaaacagcggaattattctcaatcacagagtccctttggaaatagagtcgaatgaggtgaacgaaagttatctttcaaaaaagaaagattatttcgggcatctcttagaaaaggtataattttctcattacgctgagaaacaacttccactcaccaaaaccaatcttatgaaaaaaattctgcttaccggcgctaccggatacatcgggaaacgaatgattaacgtaatcgctgcacagggatatcaggtaatctgctgctgcagagataaaaaccgtttttctaaaagtgtggatattgatgatgcccagattgaagtggtggaagtggattttctgaaacccgaaacactggaaaatattcctaaagatatttcgggagcgtattatctgatgcattcgatgagcaacagcaacgattatgcagaaattgaaagacaatgcgctgttaatttttcaaattatattgaaaccaccgactgtaaacacattatttatctctcgggtttggcgaatgaaaaagaattatcacaacatttgagttcaagatttgaagttgaaaaaatcctgatgaaatgcaaagttccggcaacggttttaagagcgggaattattattggttcaggaagtgcatcgttcgaaatcatcagagatctggtagaaaaattaccggttatggtggctccgaaatggctccacacaaaatgtcagccgattggaattgccaatgttctggattttctgatttttaccttatttaaagaacagacgtatcacagaaattttgacattggctgtgataatgttttgacctacaaagaaatgcttttggagtttgctaaaatcagaggactgaaaagaaagattttcaccgttcctgtaatgactccgaaattgtcttcatactggctatattttattacttcaacatcctataatttagcttctgcattggtcggaagcatgaagattgaagtcatctgcagaccggaaagccttgcggaaatcaaacagattaccggagttcagccattttcttatgatacggctttgagaagaacgctggctaaaattcaggataatgaaattgcttcaagctggaaagacagttttatcagcagcagaagtgattccagcctgaaagattatctcgatgttccgaaatacggctgctttgtagatttgagaacagaagaatacgataaccgtgaaaaatgtctccacagagttttttctttgggcggcgcaaacggatggtacggtcaaagtctctggaaggttcgcggttttatggatttattggttggcggaccgggactgagacgcggaagaacgcatcccgataaacttcatgaaggcgatgcgctggatttctggcgtgttctatatgccaacaaagaagaaggaaaactgattcttttcgcagaaatgaagcttcccggagaagcgtggttaatgtttaaagtctacaaaggtaaactttggcaaaaagcggttttccgacctcacggattaacgggaagactctattggtattctgttttgccgtttcacggaattatctttaaagggatggtaagaagactggcaggaaaaatttcttgatttcaaatatatccgattattttttaagaattggcagcacataaacgtgttgccagttttttgtatgatatgtcagcggtaaacaattgaggattatatttttaagcaaattttaaatattgccttaaacatcatatagaaaatttttattaatcttatttctatatcactttcataatgcttaattttaaagctttaaacgtttaaacatttactaatacatcatcataatggaaaaatacagttatggtatgatcggactgggagttatggggagaaatctcctgtacaacatcgccgatcacggattttctattgcaggatttgatcttgatcatgaaaaaataaaagatttggaagaacagaaaacttccgatatgaatatcaaaggaataccttctctggaagattttgtatcgcagctggaaacaccgcgaaaaattattctgatggttcctgccggaaaaccggtagatgcggtattagaaaatcttaaaccgattctgagcgaaggagatatcgtaatagatgccggaaattcttatttcaaagataccgaccgacgtgtggcagatctggcttcccaaaagcttcattttatgggaatgggagtttccggaggcgaaaaaggagcgagaacaggaccaagtattatgccgggcggagatcaggaagcgttcggacttttacagccgatgctggaagccattgcagccaaagtagatggtgatgcgtgtacagcctacatgggaaaaggttctgccggaaattatgtgaaaatggttcacaacgggattgaatatgccatcatgcagctcatcagcgaagcgtatgatttgctgagaaaaggagcaaagcttacaaatgatgagctttatgaagtgtttaaagaatggaataacggagaaatgaattctttcctgatcgaaattacaagagacattttccagcagaaagattctttgactgacggttatcttgttgatcagattttagataaagcaggtgcaaaaggaaccggaaaatggacttccgaacaggcaatggaaatcggcgtttcaattccgacgattgatattgcggtaacgtccagaattttatcagcttataaagacgaaagaataaaagcgtcgcaactatattctcacagtgaggttgtaactcctgagaacaaagaaattttcattaaagaagtgggagaagctctgtatttatctacactaatcagctatgcacaaggtctggctttactggtaaaagcttctgaagaatatcagtttgaaattcctctgaaagatgtggtaaaaatctggagaggaggatgcattatccgttccgttttattggagaaattctacgctgcttacacaaaaaatcctcagctttccaatattttgcttgatgaggaaatctcggctatcgttaaagaaagagtttcatcactgagaaaaacagccgcttttgcagtttcaaacggtatttcaagcttaggacttcagacgactttaggatattttgatgcctacaccacagaatctcttccggtgaatttaattcaggcgcagagagattatttcggagcacatacctaccagagaaccgacagagagggagtttttcacaccaactgggaaagttttaatcattaaaattcagaaatgagcgaaaataaagttttgcagccaacaacaattatcatttttggcgcaacaggagatttagcaaaaagaaaactttttcctgctttttacaatctttatattgatggaagaatgccgaaaggcttcaatatcattgctttgggaagagcagataattctgatgaatatttcaaaaattacatcagagaaaacctgaacagcttttcaagaaaaaaagtaacttcagaagactgggcgggatttcaggcacatattacctattttcagcatcagcttgatgaagagagttcctataaaaatcttaatcagaagctggaaagttttgataaagtgtacggaacgagaggaaacagacttttttacctttcaataggtcccaattttgtggctactatttccaatcatatcaaaagtgcatcgctggcttcagatcctgaaaaagaccgtattattatcgaaaaacctttcgggcacgataaacagtctgcgattgagctgaacagccttttggcagaagcatttgaagaagagcagatctacaggatcgatcattatctgggaaaggaaactgtacagaatattcttgccttcaggttcggaaactctatttttgaacctttatgggataataaacatatcgaatctatacaaattacggtagccgaagaagtaggtgtggaaaccagaggcagcttctatgaacagaccggagctttgagagacatgatccagaatcacctgttgcagattctctgtatggtggcaatggaaccgcctgcttcactggaatccggagaaatcagagatcgtaaagtagatgttttgaaatctatccgaagaattcctgcggagaaagtagaccattacgccgtgagagggcaatatggaaaaggaaagttaaatggcgaaaaagcgaaaggttacaggcaggaagaagggattgcgccggattccaacacagaaacttttgccgccgtaaagttctatctggataatgaaagatggcagggtgttccgttttacgttcgtaccggaaaaaagatgaaggagaaacattcttacatcaccattcagtttaagccgcttccgcattctacgttttcagaaagctcacagcatttatctgccaatcgactgattatcaatattcagcctttaatggatatcagactccagttcatggcaaaaaaaccgggactttcattggttttaaaacctgtggaaatgatttttgataattttgcctgtcaggaagatacgccggaagcttacgaaaccttattgctggatgcacttttaggagatttaaccctctttatgcgttccgatcaggtggaagaagcctgggatgtggtgaaaaccattcaggaagcgtgggcaaatgaaaaagacagctctttcccgaattatgaagccggaagctggggtccggaagaaagtactgctctggtagaaagacagggacatcactgggtttaaaatttaataagaaaagtaaaaatgaagattaccgtatttaacgatttagatacattatataaaaaagcagcagaccgttttgtagatttggctgaaaagtcgattcaggatcacgaccgttttgtggtggcgctaagtggaggttcttctccgaaagcgatctttaagctgttggcttccggggaatatgcagataaaatagagtggagcaaagtcttttttttctgggtagacgaaagatgggttccgctgaatgacgagaaaagcaatgctaaaatgacattcgatacacttctcgatcatgtttccgtacataaagatcacattttcccgatgtataaagacggagtttctgcggaagaatttgctgcggaatatgaaaatcagatcagaaatgttctgggaaatgacggaagttttgattttattctgttggggatgggagacgacggacatacagcatcactgtttccgggagaaaaagtgctttgggaaaaggaaaagtgggtcgatgcgtattatctgaaacctcaggaaatgttcagaatcactcttacagctccagtcattaacaacgcagaaaatattttgatcgtcacctttggagaaagcaaaaaacaggctttgaatgaagttttaagcggagtttacaatccggaactgtatccgatgcagcttattgaaaaaagagaaagcgtagaattgttcacagacgaaaaagcaaaaggataatcattaaattttaaacttgtttaagctctttatttgaaccacaaaaaaggacaaaagattgagctgctgtagttaaagttaataaagattttaaagttttttaaaacaaaaatattcttgttggaaaatgcaaagacgcaagatttctattagtctcaaatctttaaggcgcaagaaaatcaaagattttcaataaagaattgatgtttaattttatcgttaaattaataattgtttaaataggtattgcatatattaagcagcgacggcacttgtgccgtcgctgctttctttaaaaccatagtataaatatttacttaccctttgtgatacggacagcctgatgtcgcagccggagcatttaaggatatattttccggcgtttttgttccttcaaaaaactgctcttctataatttttctctgatcttcaggaatatcctccagttttcgaagcgtgttcacctgaatatgcggccagcttgtcgttccgccgtcatctccgaaatggaattcaaaaagaataatctgctcatactgaagctgaagaatctctcttccgttttctaccaccgtttcgatccacattctgaaatttacctctaccgtcggaacaaaacggttgacaaaaggaacatttaaaatcccgccttgcgcgccggtctgattttttgaagacatctgaagaaaaacataattcttaacttcctgtccgctgagcgtatctcttagtctcagatccggtcgtaccgaataaggataaagatcgtgtgcaagaattctctgcgtgtaaattttattttctcccggatcatttttgtcattcagcgtttcgtgaacccactccggagcgggctcatccagattgataggatgcgtttcactcgctcctgctcctcccatcgttggcgaaacagaaaggaaatcgtaattccatgctttatcgccttccggaaactgcggagctccctgaacaagataattggattgggaaggaacaatgtcgcccagtaaagtgatcgtgcttccatgaggaatcactccgcttcgcgaaatagaataatccggaataaaatacggtccgcgattaccggctcccggttttagttcttttgccggaatgatctcataatattcctgtccttccttcagttcactcatcagaatatactgaggatttccgttttcatctttcacctgcaccaaaggctcgtttctgtattcgcctttgtacccgtagtttttgtaatcttcctcatcaaaagcatgaattccgcggtctctttctatagattcctttgtagctgcgtgattgtagacatcactcagccagagatacatcccattttcttcatgaataggcgtgtacagcaaatctggattatctttttgggtatttacacttttaatgctctgctcatactttatagccccgcagaaaagttcatttgctccgccacggttgcgcacacctcccggaacaagagaaaagacaagtttttctatgtattcttcacattcgaagctgaactttcccggaattgttcccgaattcgttcccggtgaaggcataatcgtggtatgaacgccgcttccgttcattgttctgtcgatatttttattgtaatcggcgttgtagctcacccaggttccgtccagagcctttaaaattccatagtctacattatctacaatctggttcagatttttttctctgaaaggaatcagcggatcatcgatcgtgagtttggaataccctttcataaggttttccagaaaaccctgagaactgtctgcggatgttctcagaaacaggctttcctgctcaatactttctttttgtcttttcagcatggtaatttcgtttttataatgattagtttttttgattctgaaaattattttaaacttcaaaatagaggtttaaagatttccgaaatcatcagttttactcttcaaaattaatcagtctgggaaagaaaaaagtcagtagttttacttaattctattggttgatcataacttgcttttgcaatccctgatatcttttacatccctagattttgcagtaatctcaggcattttgtagtaaaattgaaattatttgtgaattcttggaaattttttcttcactattaggctggaatcaccataaaagctatatttgcagcctaaattttaaaaataatgaaagaactaattgaaaaaatcaacgcagaatttgaagctttcacaactgaagcaaaccaacaagcagaaaaaggaaacaaagcagctggaacaagagctcgtaaagcagctttggaactaagcaagcttttcaaggaattcagaaaagtttctgttgaagaatcaaaaaaatagttgttcccaaaaccggctttcagtcggttttttttatttgaatttttacaaagaaatttagttttttaaatcatcactcttatgtggtcttgatttgtggattgtaaatcaaaagcgaatctcattcacccttgactttttcaccattcaccagcaacaattcaccatcaccaaatcctttccgcgttttcccatttccgcgaatctctttatctttagggctacaatgattaatatgaagataaacagatttcttgcattgcctgttatgatggcgatgacgcaattttctctggctcagaatgccgtttctcaggaaaaacttaatcccgtagttcagaatttcgtgaatgaggtaaacaataattcccagcttgaaacgatggcgtatgaacttttggacggaatcggtcctcgactgatcggaactccggaaatgtttgctgccaatgaatggacggcaaataaattgaaatcatgggatattgaagccagtctgcaacagtttggaacatggaaaggatggcaaagaggaattacccatgtggatatgacgtttcctcgtatgaaaagtttatcggcaacccagttagcatggagtccggcaaccaaaaaagcagtggaagcagaagttattattctcccgaaagtttcttccaaagctgagtttgaccgatggatttcttccgtgaaaggaaaggttgttttgatggcgcaatatcagaaaattggtcgctcagacgatcagattaaagaatttgcaacacctgaactgtatgagaaactcaaaaaagagaaagaacaggcttcaaaagagtatcagaattatataaaaagcatcggctataacaatgaaacgcttcctgaagctctggaaaaagcgggtgcggcaggaattgcgatttccaactggacgggaattatgggagccaacagaatttttgaggcaaaaacgaagaatattcccatgttcgatattgagcttgaagattacggaatgttgtacagaatggcagaaaacggcgcaaaacccaagatcaggatggagatgaagtcaaaaatccttcctgaaaccaaatcgttcaacaccatcggaatgattaaaggaaaagaaaaacctgatgaatacgttattctttctgcgcatctggattcgtgggacggtgcgcaaggcgctacagacaacggaacgggagttttaaccatgcttgaagcgatgagaattcttaagaaatattatcctgataacaaaaggacgattattgtcggactttggggaagtgaagagcagggactgaacggttcgagaagttttgtagcggatcatccggagattgtaaagggagttcaggcggttttcaatcaggacaacgggacgggtagagtagtgaacatcggcggacagggttttgtacatgcttacgattatcttgggaaatggctgaatgcggttcctaaaaatattaaaagccagattaaaacagactttccgggaactccgggtggaagaggttctgatcatgcttctttcgtggcagcgggagttccgtcgttcggactgggttctttaaactggggttattttggctacacatggcatacgacaaaagatacctacgacaaaattatttttgatgaggtgaaaagcaatgtgattctaacggcaactttagcatatatggcttcagaagaccccgaattttcgaaccgagaaaaaagagcaatgccgctggacgataaaggacagattactaaatggccggaagtgagaaaagcggtaagagattttaaggattattaataaagtttaagtaaaagttagaaaactctatagagttttatctgtgtagaaaacatattcgcaaggcattcagcgttccgtaggaacgctatctttagaacattcattgagaattactgatatcaatcctacggattgattgatagacttattcttatttctacacagattctgctcctaaaagagcaaaacttttttactttaaatttttaattgaatatccgttaaacaacctattactatgcactgatatgaaaatcaattatttataacagtcacttcgacaagctcagtgtgacacctctaatactaaacgcttgatttctagcgatgtcaagctgagcctgtcgaagctttaggttaataaacggacaatcaaaatttttataataaaaaaagcgactcaattcatgagtcactttttatttagagaaaaccggttatgaagaagcttcctgatctcttccatttttatttcttttacaatataggttttacagatctcgttattgaaatgcatatgaaaatccatccgcatggatttgtttgatgattcattttctggctgttcataattgatccaaaaaaagaaaagatttgccagacaaagcaaatttcttgcaaatgatttcagaatattgggatagttaccgtaatcatcaattacttttattttaaaaatctttttgccaagagtacatccgaaaaaatgttctgttattgatcctaaaacaattgcacacggaattgaaagaatcagagctacaataaggggtttatgcaatatgaaaacgaaaagcagggtaaagggaatcatgtctataattttggaacagaatctgtccctgcggttcttttcgtaggaagtatcataagggatttcatattcaaaaaattcatagatgcgtcttccttccgaatcaaaatttcgggttgccctgcgtgttgttttattttctttaagttctgaaattttcatcttaccatgtgtttccattcattctattgtgttatgctgaatatgataataaaaccaaaatcatttaaaaatcagcgatttgagatttttcgactccacttcgtttcgctcaaaataacaatttcgtaaataaaataactatctaaacagacttgaatttaaaaccttaatcattcttacaaaaccatactcagctgaattctttttctcgcttcatcaatctccgttactcttacctgaacgtgctgatgcagttttaccacttcgttcacatcagaaacaaagccgtcttttaactgggaaatatgaaccaatccgctttccttgattcccagatctacaaaacatccaaaagcggtgatgttattaacgattccgggcagaatcattcctgtttttaaatctttgatgctttttacattcggatcaaattcaaaaattttagccgcttttcttggatccagtcccggtttttcaagctcttttaaaatatctttgattcctaaaattccgatgtctccggtgatgtagttttcgggttttatcaatgcgatcttttctttgttggcgatcagctcattggtttttatgcctaaatcttttgccattttttcaacaattccgtaggcttcaggatgtacggcagaattatccagcggatttttggcattatgaattctcacaaatgcggctgcctgctgaaacgctttttctcccagtctcggaacttttttcagttgttttctgtcttcaaaagctccgttttctgcgcggtagttcacaatattttctgccattttctcgccgattcctgaaacgtaacttagtaaagatttacttgccgtattcagattgattcctacagaattcacacatttcatcactgtagaatccagttcgttttttagctgagtctgatccacatcgtgctgatattgtccgactccgatggatttcggatctatttttaccagttccgccaacggatccgccagtcttcttccgatggaaaccgatccgcgaaccgtcacgtcatagcttggaaattcttcacgcgcaattttacttgcagagtacaccgaagctccggcttccgaaacaacgaaaacctgtaaaggtttgtcgaatgcaattttcttgatgaaaaactcggtttcgcggcttgcggttccgtttccgatggaaatggcttcaatgttatacgcatttaccatggaacggatttttttcattgccattccgctttcgttttgcggagcgtgtggataaatggtctcgttgtggagcagatcgcctttttcgtctaaacagactactttgcaaccgcttctgtaacccggatcaattgcgagaatccttttttctcccaaaggcggagcaagaagaagctgcgtaaggttttcagcgaaaatttcgatggcttttttatcggctttttctttcgcttcctgtaaggtttcgttggagattgcgggttccagtaatcttttatagctgtctttgatcgccagtgaaatctgttccgatgtttcgttgttggatttgatgatggcattttcaataaaatcaatggcttcttccttatcgatcccgatattggttttcacaaaaccttcagattcggctctcaacatggctaaaaggcggtgagaaggcattctgttcaggttttcctcccattcgaaatattgtgagaatttctgtgcttcttcttcgtcttttttggctttcactacttttgaagtaaccattgcttttcgctgaaataatcggcgcagattttttctcacatacatattttcgttgatccattctgccatgatgtctcttgcgccctgcaaagcttcttcttcggaggcaacctgatcgttcagatattttgaagccaaaaactgcagatcctgaactttctggctcataatcattttcgctaaaggttccagtcctttttctttcgcggcatcggctttggttttctttctttttttgaacggcagataaagatcttcaatttcctgaatatcaaaactttcttcaattctctgtttcagttccggcgttaaagcattttgttcttcaatcgattttaagatggattcttttctttttacaatttcttcaaactgtttactgagtttcgaaatctgttcaatctgtgtttcgtcaaggtttccggttttatcctttcggtagcgggaaatgaaagggatggtgcagtcttcggccaatagttctaaagtggcattgatgcttttttcggatatattgagggattgctgtatgtattgtgttgtgttcattgtaaattttaaagggctaaaataatcaaaatgtcttttgtaaacctattttaagtttaactacattatttgtaaaaagctttactgtcttatttaaatttaacaaagaccaagaaagatattgtctgtttaagattttaagtttgtgatgattaaaattcaaataaagaaaaaattgactgtaataatacaaaataagatgaatatgctttgcttgaagataaactttaaacttttttaccacaaaagatgcaaaagatttaaacactttagttgtctaagtttaatatctaaatggaaaaagagcacgtaagttttaaaaaatcaaagattttttctctttgcagacttttgaaatactttacatagatccgataaagtccttgtctcttttgctgttaaatttaaaatgaatttaaacaaatttgatacaaagattttaattgtaccatgtgtatttaataattcttattttagcggaaaggtcactaatggaaaccctgaaatttgatttcttgatgtatgataagataaaagtgtgggatgttttctatttttggttccggaatttagaaattcagaataaactttaaacaatttaaataatatgaaaaaactaagtgttattgcattggttgcagtaggattacttgcagcgtcttgtaacaaagaaaaatcggctgaaaatgcagcaacttctactgagcagaaagtagcagaaagcaaaggggaagttttgcctgtagatacggtaggttctgtggtaaactggaaggcattccacaaaggaggaatggctccgcgttggggaactttaatggtaaaatcgggagatctgagcatcgaaaacggtggcgtaacggcaggaaactttgtaatcgacatgaactctattaaagtagatccggcttctgtaacggaaaaagataaaaaaccggcagatcttgaagcgcaccttaaaaaccctgatttcttcgacacggcaaaaaatccaacggctgatttcaaaattacaagcgtagcagatcttaaggaagctccaaaagatgcagtagcaggagctaacaaaacagtgagcggaaaccttactttatcgggaaaaacaatgaatgtaacattccctgcaaaagtggatgtaacagaaaattcagcggcaatacaggctaaattcacggtgaacagagcagactggggaattaaattcggaacttctgaagcggatcctgcagaatggatgatcagcaaagacatcgaaatcgctgtagatgtaaaagctaaaaaataatattgttagatatttcagatttgtaaagctgccttttttggaggtcactgaaaaactaaatttttattaaccaataaaaaaggagtgtaaaacgtatagttttacgctccttctttgtatattaacactgcatttaagagtaaagcagatgttaatacagcagcannnnnnnnnnnnnnnnnnnnnnnnnnnnnnnnnnnnnnnnnnnnnnnnnnnnnnnnnnnnnnnnnnnnnnnnnnnnnnnnnnnnnnnnnnnnnnnnnnnngttctgcatcatgagtttctgctttgaggatatcaaagtgttcaactaaaaattcaggaagtaacaatttaagaagttcttgatcgcttagcaatatacaaagataaaactacttaacattccccccaagttttgagcctgagcccattcatcaatcatcattcatcattactcattactattcgcagtttcctagccccgatagaaacggataccccgcagcgtgatgtgggaaagaaggcattagctcggaaagccgggcgcgaggagtagaattggatagcgggaataagcttctgaaaatataatctgtattcggtaaagaaaatttctacaaagcacttattgtaaaaacaatctggctattataatttgttgcaggcagagtaacagacactccggaaagttgtaattgtaagggaatattggaataagcagcgagagccaacacagcagttattctaaataattcgatatctgttgtcagtggaattgtggtgtatgtggttcctccggaaatggtacataaaagacaagttgtagatccgtcgccggttcttcttgcgcttaaaatgagattcggattccaggcaggatttgctgtatagtgcatactaactttgccactgctgagtaataatggaacacttgcagctaatataatctgacttggagaactttcatatgttccttggtaattacttcccgcttcagttatagatggaattgttaccgtccagtttgttcccccgacagttaatgtgcgttgtgaatatgagttagaaaatacagtcataatcacaatgaatatatttttaacaataaatttttttaaattaatcattttaactttattctgttatggtataggttataataaccggcgtgttcgatcttgagtccaggctggaataattattggttacgagagtcattgttaactgatgcccattattggaaccgttacctgtaaatgcacctccaataccgctgattatagtctgagctgctgttgtaagagtaatctgtgcagatggaactcctaatattcctcctcctgaacctgaagctattgctgcctgaattttaatatcaattcccggaattgtctggttaaccgatgccgtgattctgcgagataatccggaaggggcaattgctgaagtatagttaatccattttgatgtatttgcaacgggcgctgttatggcatttccggcttcagttggggctgtataatttagactaatggctccggaaggctcaatatccatgagtgtaactactggtaaggcaacagcaatgtttctgcttcctgtcgtttgagaaaaaaaatcacaggaaatcatgagaaataataaaaacaaaggtttcagaacattcatttttgattttttacttcgttataacttactttaatggattcctgctgatattttatttccgattgctgctttataatatgtacaattacatttttaatttctgaaggttttagtgtaagattaaaattttctacgggaattttatacttcttatccaatccgtttctgtaaacttttactttccattctccgggtcgcaagtaagtgaaatcaaaattctctccgatcatcactattttacgagaaatctgatttccgtttgaggcttcgatgatgatattttcttttttcttacggtcttttttgttggataatccgatgaagttggattgagcattttccgaatactcagtttttccctgaattcctgcggcacctgttaatccgaaattgaaaacattttccttattggttaactgcaaagaagcaggaagactgatgtttgaaatatcattaatatccgttgtagatcgatcgatttccagaatataatctccgggaatcacatttttaaaatcaaaatttccatttttatccgttacagataaataatgccccagtagaattcttattccgtccacttttttcacgcctaaattaataatcgttcctgaaagcgtaatgtaatccgctgttttttgcgtgggaatatttaatcttgccgtatagcgaagagaaaagataaagtctttatttcccagttctccgcgttgtaaagtatatcttccggagagatcaaattcatgtccctgaaatatttcctgatgatacaagagttcaaataaatttctgtcggcaaaatattcttcaggcatataattgttctgataaaataaactgaaatttgtcttttgagaaatcctgctcagaattcttgctccgtaataaacctgcttctgattttgcatctggtatcttgaagtaacggcataacttccatagatattgaatgaagttctgaatttttcaaagccgatatttgccgtataaaaacctgaattgccagaaaagtttaaaagataattttttgtttttccgaattgtccttctgcattgaattgaaaaatgccgagctgctgatcgatactgattctgaaaaactgttctttataatcaaactcctttggactcagtcggtcttcgtatcgctgaaatccattaaaaatagtaaaagatcctcttttcgcatatctgtactgaattccataatgaaggtattttctgtaaggagcagcaagaaaaagagtatcgcgctgaaagttttttgcatcctgaacaaaattggcaaggatatttattttttctgaaatcctgtactgaatatttccgttaaaagtactcgtattattaaaatatccagcatattcaggacttgtacgcatatacattatatttccgctgattttattaaaattcgcaaccgtttgtatcatgaaagcatttccctttgtctgttgagttttgctgtaagagatttctccggaaacttctatgtttttatttaattgaaattttccggttacatacggaagctgtgcatcagaatccagcctgaaattgctaaaacttaatgcttgatggtctttacggggaattttatataaatatcccgctgtaatctcagacgcttttgagattttaaattttgaatacacattaaattcatcctgaatatctctgaaaaatctggggtgattataaaaacctccgaaactcatcttttttgtatcgatttgaatttccgctccacgtccatatcttgcatattccgttaaaaatgaagaggaataatttttatctccgacatgaatgtacaggttttctctcttatagttcacaaaatattcctcatacttcgtgaaagaattaaattcaacaggatttttcgttactgcatgaaattccaccagatttttattctttttatccagactgcctttactgtaaatttcaccctgaaatccgttttgataatcgccgcggttttccattcctgtaaaagcaagagaggcaaaaacaggaagcctgtgaaatacatcttcttctgatggttttacggaaataatcttcacacttgcataagcagatagattttctttcggatgatctcgcgagtaaacggaaagtatgatgttttgacattcatttttacctaaatccggactggttgtttttgatacagttattattttctgttcacccggagataaaatcaatgaattttcctgatcaatcagcgcgtttttactttccagaatcagattttctttaaagtttccgttgttttttagcagaaatgtagaaaaaattgtttctcccgctcttacaaattcaggagcatttaaagtcgatagtaaaagttttcggtttcccgaaacagcaaattcaaaatcattggaaaactgatcgcctgttttgctttcagttccgtgaagagtaattttatatcttccctgaggagtttcggatgcaatttttaccggaacaaggtagacacttttttctcctgatgagatttcgatttctccttttgctaaaatgggaacaatgttctggttagaagtttcaacagagagcttgtaaattttattttcagaaaaattattttctatggtaaatggaatagaagtggtggttcccggcatcagactgtctttttttccaataccattttttgtctgggaaaaaaatactgccggaaataaaataaaaatatataatgcaacgtttttaatcattttttacttctagttccacattaagggcaaaagcattttcatcttcgtctgttgcgataagaactgccttataaagagaaggaggcgttttttcaagatcaatatgaaaagattttgaggtttgtggcagtaatcccattgcctgactcgtaaagcttccggttttctgtccgctctttttatcatacatttccattaccaccgtcggtttgcaatacagatttcccttattagaaatggcaacctttacaatctgttttgcgttttctttttcaatttttattccctcaaatttaagatcaggttttgctttatcagtatccagatctgtaattacctgtactgcataccggataattgaagttatgtttacaccctgcttattttctttaggatttatttcttccacaggttctacaataataacgctccagtagcttccgggttcagaaagttgatcaggaacggtaatttcataatagatttccgttttttctttggatttaagcgtaaccagattggtgttcattttaatccagtctgtattggttttaacgttcgtatgaggagcagaatactgaatggttccatctgactgataactgaaatcctgaagaaataattttacactttgagactggcttcctgtattttcaatagcaattttgcctttgtatatttttccgttttctactttataagtatgggaaagtccgttcagtactacaattcctgctttcagaaacacaaactgaagcatcaaaaaagaaaatagcaagatctgctttatcataattgtatgtaaagttttaagtttgacaaaagactgtgcaagaccaagaagaaatttctgcaacttcttcctgtctttatttggggaaattcctttttttagttatccgaaatggtgtaggttaccgtagcaacagtggtagctgcagcggtaagatctgcataagcagcaactccaccgggaccacttccggcagctaaagcataggtaagattatgtccgttattggctccgtttccggtatatgcacttccgattccggaaatgatggtttggtctgcagcactcaaagtaagctgtgcagaaggtgtgcccaaagttcctcctccggaacctgttgccgcagcagcggttacattgatatcaattcccggaataacggcatttagttttacggaaacattgcgggtaggatctgcgacagattttatagaagaataattaagccataaagtggtattggctgcgtttgcgacaatcgggtttccggcttctgtaggagctgtgaagcccaaagtaatgtttttgctggcagcaggttcaatatctaccaaggctacttccggaacggaaatcgtgatggtgtgattgtctgtgttggtgtcttgtgcgcttacgtgagaagatactgcaattgcgactaaagacaaagctaaagtgaacttaaatcttttcatggtgatatatttagtttcgtgaagttaataattttaaattgaatataaaaatatttaataataaatttttattattaccatttaataatcagtattttataaatgtaaataatatgttaaattaatgattgaattattgaatttttacaatttgcatcaacgaaaagaaaaatctcacacaattttgcatgagatttttgtttatctatttaaaaataatcagctaaaaataccttttaaaaccggctcagaattccccagtggattttaatatcattgaatttaaaaggatttccgaactcgttaccgttggaaagctggaaactcatcaacccgatcggaataaagaaattaaaaccgagacccacactgtaaagtttaggcttcacattcagagatttattattgagctgtccgtactgcccgaaaacatcaaaaaatgcctggcttccgatgagataacggtattctaaactgccgtaataatagaaatcggcggcgagagagttttcattgaaaccccgcatggaattccagcccccgaaacggtacaattcattggcagaaaagtcgattttagaatccatcatcgctccttccgctttgatgttgaggaaatgatttccgttgatatgataattgtgctctccaaagaagtaaaactgattctgcggagattttatattgtctttggtgtaagtagtcgttaaataatcgtatccggcattaatttttgttttataaaggaaaagatcaatatcggtcggttctaccatttcaaaccagattccgattccttttttgttgtaatctttaccctgaacatacaacgtatcgatgatgctggaactttcgaaagtacctctcagtcccagtttatttcgggagttcagatgataataaaatgccggaagtgcctttacattggcaaatgtagaatcctgacggaaaatattcaccttcatattcagacctacattggatttaaaaaggtaaggaatatcggtctgaagatcaaaagtctgtcctttatccgggtttctctgccagtaaagattgatgagctcaaaactgttgaaaatatttctgaaattcacattcaaagttccgttcagggtaaatttatccgttttatcgtttccgaaaccaatgaccccgtcaaaactgttggtttttttcttttccatgaaaagataaatgctcgtggaatctttggtgaacaaggtttgcggaggacgctccaaagcaacaaactgatgactctggaaagacttattaatggcaatcaggtttttatcatcataattttttcccttaaattccttctccagatttttaatgaatcttttcggaacactggtgtagccttttaccacgaagttatcgatggttcttttatcgttcttgttgatgtcgagttctacaacaggataaccgtttttctgccctttatatttggattttattctgctgaatgcaaagccttcatcaatatactttttgttgatgctttttttgattgaatctaaatttttagtgaaaaattctttctgaatcttcgttttatttgaaattgaatctgaaagattaacgtaagtctggttgaaatttttccctttgtcataaaatatttctgtgctgtcacctttttttctgacttctttcaactgggtgaaaaagtaattggtctgagccagagaatccagaaacttcactgctgaagcagaatcttttacctttttcttcaccttggtttcagaatcgatcaggaaataatgcttcttctgcgcctgtacaaaaacgcaaaacagtacaaaaaatatttttagaattaatttcaatgttacatttttaaaccattaagattttatttaagaagttaagaatagtaagctaaacttaaattttacacatttaggatacagaataagttttcttaggaatgatcttaacttttaatgattgtccgtaatttgtcatcattgaaaaacctttgagttctttgctgagtgaaacgcctttgcgaacttaaaacagttggtatataaaaagaatcttagcgatctttgcgttaaaattaagcattatgatcaatgacggataatcaaacaactttttaaatattcattagatttattttttttaaaataactgaaactaagccagtttattgtatttcttcatcagattttcataagtttcctgcggaagaatccatttcagcggaacgccgattttctgtccgaatttaccaaaataataatgtgctttccatttatttttgcttaaaagctgatctacatatgctgcaacttccagcggttctgttccgtcgcccacgtgagcattcattaaagcatacactttatcgaaaacatttttgtaaggttctgaaacctttgttcttacacggttttctgcaatattcgttttgatatctcctaaatgaagcgagcagacattcacattccagggataaacttcgtatctcatcgcttccgttactttatccaaagccgattttgaagccgaataaaatcctcggaaaggcaatcccatttcacttccgatactggaaatattgatgatttgtccgaatttattttcgcgcattttcggcattacggcactcatcatttgtacagctccgaccaaattcagattaaacagtttcaaaatatcttctttggaagaatcttccacagctcctaccattcccattccggcattattgatgagaacgtcaattctgttttctgttttcaaaacttcagcaatggcattttgaatggcttcattgtctgtaacgtccgtcggaatcgatttgaaatactgactttcggtgtgttttctgcttaagccatatactttatgacctttcttcccgaaatattctgctaacacgaaaccaattcctgaggaagttccggtaatgatgatggtttttgacattagtattgtaaatgtttatctgaattaggaattttaattaaattttctccaggcttaaaattattcatttttacaagttttttaatcttataataaaattctttatgaaaatcttcagcaggtgcttttttgtcttccggaaaacatggataatatttttgatctacaattgcctttccggtcgaaaaattaatttcatcatacatattaaattcgcagttgtcatcaaagttctgaagtgagccgatcagataaaaatcatcatcctgaaatctgtaggtatgtttataagtcatcctgtgtcttgaatttgtactgaatgattgtgtaatattcaatgctcctttttttatggatatttcaggcaaaggatcagattccggagaaaatcctatctcttgcggaaaaattatcgttgaatactttttccagatttttaattttccgttgattttttttagaataaaaagttctctctgagggctttcgcgatcataaaaagattttacttttttagtggaattgaaaacaatgattatttcttctttaccatctttgtccaaatctccttttgtttccactaattttttatacccttttggagtcacgaaatttttcaattcttgagcttgaagaactgaaaaaagaaaaattatatgtaataaaaatatttttttcactgtaatctcaaaaagatagtccaatatcttctttcttaatcatttttgtatcttgaaggtcacaaatacagcctttgactgttttataatttcctgaaattctagtctccttacctttaccatctgtaattatgattccggcggaataagattcaccttctgcatgatatgttctgaataataaatattcaaaaccattatttttaaactgaagattatctatttccattcctgcgttttcaatgcctccgcctcgccagtacgaattataatgaaatttcttccagctttcttttgttctttctttcggaaattccatttcaattttggttttagttccaaaacgatattgaatgtatttattggttttgtcttttaccaaatacattctctttccgttttttgtatcgaaagaataaacgatttcttcattgggtaaaaggtattgtgcccaaaataagagtggaattaaaaaataaattaagataaagaactttttcacttattctttaattaataaattttccaaatccctccaaaacataggatacgatttttccacaacatcttcctcttcaatatttaattctttgatcaggcaaaacggtgcaaaactcatcgccattctgtgatcctgatacgttgcaatggaaatattttcctgaggttcgttgaaactaatagatttaatcgtcaaatctgtaaattctgtttccgtacccagcttttttagttcattatgtaaagctaaaagacgatcggtttcttttacacgcaaagtttccaatcctgaaatttcaaaagggattttcaaggctgctgcggttacacaaagtgtttgggcgatgtccggacaattattcatatccagaacgatcttttcgggaaactgaaatccttcaatcggctcaagcgttaatttatgctcctgttccgtgaaagtcgttttaattccgaaaaattcttcataaatttttacaattgccgagtctccctgtgtagattctttgtaaaagctttttaaatgaatggtttttcttcccaaagcggcgaaagagtagaagtaagatgccgaactccagtcactttccacttcataattcatgatcgatgaatcataattgatgaatgattcaacttttatggtattttcgatgaaactgcttttaattccgaatcgggttaaaatattgagcgtcatttcaatataagatcgtgaagtcactttgccgactaaatttatttccagtccgttttccagttttccggcaatcagaagaagagaggtaatgaactggctggaaatatccgccggaacatctactgtggtctccgtaatttttcttccgtgaattttaagaggcggaaatccttcattttccagatattcgatttcgacacccagattttgcagagcggtaaccagatttttgatcggtctttctttcattctcttggaacccgtaagaatcgttgtctttccctcctgaatagaataataggacgtaaggaaacgcatcgccgttcccgcgtgatggatatccacgatatccgaatcttcagacagagcttttttcagtagctgtgtgtcctgagaattcgacagattcccgatttctatatttttaaacagactttctaaaatcaacaaacgattcgaaatacttttcgaaccgctgatctgtatggttttgttttcctgtaattttgatttttctagcttcttcattgttcttctaagttggaagctcgaagctggaagatggaggtgaaaagtttagtttaaaaacttccggcttccaacttccggcatccagctattttaatttttcattattctgatggcggtctttgtcgcgatccgtcttgatcttcatttttctgtcaaaagcttcctgcagattaactccggtctgatttgccaaacataacgttacaaacataacatctgccaattcctcgcctaaatctttacttttgtcgcttcccttctcgctttgttctccatatcttctggcgatgattcttgccacttcgcctacttcttcggttagcattgccatattggtcaattcattgaaataacgaacgccaatggtcttgatccattcgtcaacctgttgctgcagatgtgtaatttccatttatggtttgttattgatcttttcttctaatgcaattgttttcgcttccagtgtttttatttcttcttcatgatagacagaatttccgatgttctcggtaaaatctgcaaatcttttcagaagttttcttaccgtgacatacacaataatcaaaacggcaaaagccccgatgtttacaatatcaaaatccattttttaaaaatattgataagctcccactgtaggatttgaagttctcgatacatttgcgatatccgttggaaccgttgctgcaacagttgtacttccttttccgattgccggagaattctgttttactctcagattcatctgggctgcgaaataattaacaaacagcggatctaaatttttaagagactgaataactcccggacttgtattaaaatcaaaaccggcttccgaagttccggaatatttgatgagacagttctgaatggtaaaattaaataagtttggcggagtctgctcaaaattaaccgaattgtcacggtcagaatacacgatgctgtttcttaaattaaagatcagtgctccgtattcttttactccggatgcattcgtccattcattagcggctaaaattccgtttcggttgtaagaatgcagaagatccgaataattggcaatcgtacagtgggtaaaattatgcgttcctcccttgaaaattcctaccgcagattctccgcaattattcatcacaagattttttgcagtaatggtagaagcaacggcataaatcccatattcctgaaaggtgtggataaaagaattgctgatattggcattggtctgtttcatctcaagaccttttgttcctccgaagagccttgcataattcatattaagggtggaacctgcttccattttaatagaattccagttcttagggatcgtatcgtatgcaggatcatttctgtctccgcgaagcgtaacattgttggctaaagtaccgttgatgttcagtgtggctcccgaaagcactttcattccgctgtttttgtggaaatatacttttgttccctgctgaatattcaggataacattctggtcaatcgttaaatctccgtagataattttagccttattgttattccatgttgcatctgaagtaataatgttcggatttgtaggtgtttttataaaaaattccgcatcctgaaccacggagaacaatacaacctgttgttgtccgactgggctctggaataatattttatcttcggcaatcgcttcaggaccggttgcttccggcgcaatttcaacgaaaatatacagactgtctttttttcttaacgggacatccttaaaatcatatcccggtttcccatccacattgatcttatacagggaagttgcccctttttgcaggtgaatcctagggatcagaatgtctttgtcttcattattatatacttttaccgcatacgtttctgaacgaacctgatgataaaccgtatcgcagaaaaccgtgtctttggaaaagcttaattcctgtgaaggagcatcgaaactgatgtcgtccttattacaagatacagccataacaagcatccagaaagaaaaagccagtaataatttgaatttcatcgaaattaaagtttaaatagatttcaaatttaacgaaaatactttgaatttcttatgaagaaaaaaatattgatcgtctatttgtaattttaaaaaattattgtatttttgcaccctaaaattagcagagaaatatccattactatttcgaaagcaaactttaattttttaaaaattgtattatgaaaaacggaatccacccagaaaattatagacttgttgttttcaaagatatgagtaacgacgaggtgtttctttgcaagtctactgcagaaacaaaagatactatcgagtacgaaggacaagaatacccattgattaaaatggaaatctcttcaacttctcaccctttctacactggtaaagtgaagttagttgacactgcaggtagagttgataagttcatgaacaaatacaaaaaattcgctaagtaattttttgttgctacaatatttaaaagtctttcggtttccggaggactttttttattgtatttttgtttagacgttaaactttgaatttaaattaaaaactgaacgatgcaattagtattttcagatgcacaatactgggaagattttcttccgcttacttttacacgtcccgttgcagaaatgcgatgcggaatccttactttctccgaaagatggcagaaaattttagaaaataccgagatttctttcttcacggaaatgtatctgcagggaaaatttcctgagcctgcaaaaaaagaaagtctttttctagtaacgaattttttaccgacagaaaatgttattcagcagatcaaagatctgaaacagggagaagcattggtgtatgaagatgagttagtcgctgccaaaatcaatatggatggtttttctctacatcagattgagaaaatgacggacattaaagaagagcttattttctttaaaaagccgacggatctttttacgtataataaggaggctattgatttcgattttgcattgcttacaaaagacaggatttctcaggaactttcttcaaccaatggatttttgggaaataaagaagatctgtttatagaagaaggagcacaaattgaattttcgaccatcaatacaaaaacaggcaaaatctatatcgggaaaagtgctgaggtgatggaaggctgtaatcttcggggtccgattgcgctttgtgaagagtctaagtttaatttaggtgcaaaaatttatggggcaacaacaattggtcctcattgtaaagttggcggagaagtcagcaatattattatttttggatattctaataaaggtcatgatggttttgtcggaaattcagtgatcggagaatggtgtaatctgggagcagataccaattcttctaatcttaaaaataattatgctcctgtaaaattgtggaactacagaaccaaatcttttgaagatacaggattgcagtttgccggtttaattatgggagatcattctaaaacagcaatcaacacgcaattaaatacaggaacagttgtaggagttgcttccaatattttcaaagaaggttttccgccgaacctggtggaaagcttttcgtggggcggttttaaaggcgatgagaaatttaaattggacaaagcctacgaggtggcagaacgggcaatggcaagaagaaaagtgcctttaacggatgaggataaggctatttttaaacatatttttgatgcgtattgaaaataaaacctcaggatttcctgaggttttttaattattttagttcttttgcgatcattattttttcgttgatgatgttattccataataatccatttgttgcggtataatattcgttagatgaattttttggctttaatttaaaataaaaatcatatgatcctccaacaattcccttatctggaatatataaaaatctgtcaatgccgcgatgttcatcatatccatcctgcatccaccatccatcaaaagtccaaaactgataggctttctctccttttataagtagttcttttgataaatagtttctgaaactgtatggaatatcaatatttttgctgagatcagcatcgcgaggatccatgataaatttttgactgggaatttgtttcttgaaacttttttccatttgttgaatagttacctttttttcgctaatattaatcgtaccatatgtagaaacaagaggtgattctaaatttgcaatactaaaaaattctgttaaacatttcttagatacataatagctgccattttcttttttaataagtttatattgaaaagtctttttttctgaagtattattcattttccaatcacttagcatactaagcattttttctttggaaaatactttatcttttattttgtcgtaattaataatcatccagttattgcctctttcgtccgttctaggaagaatattttcatcaagatctggtagtacagataatagcaatatgttttctttagaaataaatatgttaaaaacattgatatctttttgaatattataaagatctttagtatctaaagtatattcatttatcttaaaatttgtttttaggtcatctaatgaaaaatactcctgtgcgagaaatagatttgatattaatagtgttattgtcagtattactttcataattttaatttatggacattttgttcctaagttatttcccagtaatgtgttcctttcattgttgtttaattgtgcctgttccggagttaatgttgttataccagctcttgatatagctgtgattacattattggggagattaggattgtattgtgaaacgatattttgtagcgttgttaaaaatgggactagttgtgcgtgtccttcaatgaaagtaaatgtattggtaatagttccatttgatgcataatcgtatccaacggttacgccaggatattgtgcttgaaattctgtatttcctaatttatttaattgatattttaaaaaggcatgaagaacttcatgatacatagtaaccaatatatattcttttgttgcatttagtaatacttcatcatttagattaataacggcattgaaagtgtcaaattctgtgctatatgttgcaaaggtttctccgtcaatagcccataatccactctttgccttaaaggtaatattatattttgtattattttgaaatatttgtctcatattcgaagcaatactgttatttaaatttggtaactgttgggcaatactatgtgcgcatgggtaattttgtagttggtcaattgtaatatcttgattttgtaatatagcagttgaatctgttatcccactatcacctccaaatgatggcggataatcataaccaccgttcccgcttccatcatcaggattctcaaaagtatcaattgtaagatctatacagatggtgtaagaagaagttacccagtgtccgcttccgttaggattgctctcactatccggataccacatagaaaatgtttttaccacacatacaatcttagatgtcccgttggcagaatttgcaggaagaggctttttgggtctgtcgatcatcaactgattaaaaagtgcaaccttttctacatcattagaatatctgaaatatactttccttccaaatctgggaacttccagaacttccgatatttttccgttttcgcgtataggcactacaagatagctttcattaaatttatccaacgtcattgcataatcccataatggaattccatgctctttcctgatctcattttcatgctcaccgtagattttaataatatttttgatgtagatttcatcttctttccaaagacttttagaatggtattcttcagatgtaggatcggaagaagagtaaatatcatcatgtatacacgattgtatactcaaggtgaaaatggcaataaatgtaagccatgaaattagtttttttgtcgtaagcatttgttgttttgtaaattaaagataatattttttttataactctacaaaggtgtgataaaaatattgagaaaatacagtaaaatattactgatatccgtattatttttctaaagaaaaatttatgtacttttgaagtaaatacttttatattatgactttaggtgaaaaactaaaaaaagcaagaattaacaaaaacttttcacaggaatatcttgcagaagttctaaatgtttcccaaaaaacatattctaattttgagaacgataaaagtaaaccagacttgcatcaggttgaaaatattgcaaaaactttggatgttagtgttcttgattttttaagtggtgatagtattacagtaaatcaaacaaataatgaaattgctgtagcacaaaactacgctccaattacatcttctgaaaagttaatagaacagtatgagcaaaggcttaaagataaagatgcggagatcgcatttctcaaacagcttctcgataaaaaatagaaacttcaaatttttttgaagtttttttatttttaatgtaataaaatgtaaaatccggttgtcttacttatagaaacaaaacttatgacccaagaaactttcagaagtacggtattcattctcaaagatgagatgtatcgctttgcgaaaaggtttgtcatgagcagtgatgaagcagaagacgtggtgcaggatcttatgattaaattctggcagaagaaagaagagctggagcagtttggaaatttaaaatcatatgctctgaaatcggtccggaatgaatgcctgaacagactgaaacatcacgatgtaaagctgggatttgcagatatgcagcttcaccgttccgagctttacagtatggaagtcaataatttaaaggaacacattataggtttcattaatcagcttccggagaaacagaaaatggtaatccatttgaaagatgtagaagaatatgaagtctcggaaatcggcgaaatgctggaaatggaagaaaatgcagtaagagtaaatcttatgcgggccagacaaaaagtaaaagaacaaatttcacaattgatgagttatgagcaacgacaaatttcaagataaatacgacgaaatcttccagaatttaaaggaagaaaaaatgaactgggattttgatgactttctgaaaaaagcagaaggaaaagcagaggagattcatgaaaatgatgcaccggttatcccgattgatacgaaaacaaaaccatcgttcccgaaatggttctggatggctgcaagcgtagttttgctgttgagtgttggtcttatttttaattatactcacaattcaaatgtggaaaatcaggctcagttggttgaaaaccagataaagaagcaaaaagataatttcatcgaagaaaacagtgaacatacggaacaggtagcggtaaacctgccgaatgataccgtttccggagcgaaaaaagattctgtacttcaggaaaatccggttgccgagaaagattatctggatgaaattttaccgaaaagaggaaggctgaagaaagaaagaaaaccgaagtatgtatataactcctctaaagctgcggattctacaggatataaagattcttacgttatcgttaacggaaaaagaatcgaaaatgtagaagaagcgattaatgtgactaagtattcatttcaaatatttgcaaataacgttagtgaaaaattagcaaaaccaaccgtcgtggatgacgattattaattaaccttaaaagattatgcacctgatcaggcactaataatccaaaataaaaaattgactcatgaaaaaagtattcataatattcgcactcgctttttcccatttctttaatatttacgggcaggaaaaagataagttagatcagctttttgataaatatcaggaagtggaaggggtaacgtccattaaaattgccaaaccgatgttcggaatgctgagcaatctggatttgggagatgctgaactggatcagataaaaccgttattatccaaaataaacggactgaaagttttcattgccgaaaaaccacaggacggaagttctgcgaaaggacagaagctgtcgcagatcaacaaagacatttcttcttatttaagcaatcttaagtacagtgaaatcatgacaatgaacagtaacggagctaaaataaaatttctttcagcagaagagaaaaacggaattttggatgatctgttattgagcatcgatagcggaggagaggaaaatattcttgtaaaactggacggaaaactttcgatgaatgatatcaataaaatcatcaattctacggaaacaaaaacaaatccggttaccaataccagaaataacctcacttcggaaaatacctcttcttatctgaatggcgaatccagaaatgtaggcgaattctcaggaattcaggtgagtacaggtgttaatctggtgttcaagcaggaaagtcctaccaatgtaaaggtaattgccgatgccgataagcttcagtacattattacaaaagttgacaacggggttctgaaagtgtatgttgataacaaaggacagaaaaatttaaaatttaaaaacatcagtgtcaacgtttcttcgccaagaatggataacattaaagcgtcttcgggagcaactttcaccacgattaattctgtaaaagaaaataatcttaccattgatgcgtcctctggttctgtagtgaaagggaaattcaatatttcgaataatgctttagtggaagcatcttcaggaacaaacgtgaaagttgaggtaaattcccgaagcttggtttttaaaggatcaagcggttcagatacaagccttgagggagaagccggaacagcaactttcgatatcagcagcggtgcagtgtgtaaaggtgaagattttcaggtaaaacaagtggaagcagaatctacttcaggatccagcctttctgtaaatgttaccgataaattaaaagcgaaggcttcatcaggcggaaccatccgatacagaggaaatccggaaattacttcagacatcagcaaaatgtcaggcggaagtttaaaacccatcaactaaaaatttaatttaaatccaaattgccatgaaaatattaaaaaaacttattcttgttgcctgtgcgatgttcatgttacaatcctgtatagtttcttcgggagccggcaaaatggcttacttttcagattccggaaacgattttaaaggggcaaaatttaccaccatcactgttccgatgtttttagcaaaacctgttattaaaaaagcattaagagaggacggtgaagataatgaagaggtgatccggctgatccggaaagtttcaaaaattaaagttttgactgttgaaaacggagataaatcgatgctgaatgattttgcaaagtatttaaacaacaataattatgaagaatgggcaaccataaaacataatggagaaaatgtaaatatccgcgtgaaacagaaagatgatgttattaaaaatatgctgattactgtaaattcagacaaagagcttgtttttttagatgttcgtggaaattttacggccaatgatatctcaaaaatgattgcttcggcatccgataaatagcactttatcatcaaatcatattactaaattgtttttttatacaaactaccgttccgtaaaaaggagcggttttttgatttaagttattgattattaagttttatttaaactatgaaaatcgattttcgtatttcggtaaaataccttaattttgcaagaaagtaaagatgtctattcataacaaaattgtagagacagccatcactttcgatgacgtgcttctagtcccttcttattcagaagttttacctaatcaggtttctttaaaatcaagacttaccgacaaaattacgcttaatgttccgattgtttccgctgcaatggataccgttacagaagctgaactggcaattgcactggcaagagtcggaggtttgggatttattcataaaaacatgacgatcgctgaacaggctgcacaggttaatcgtgtaaagcgttcggaaaacggaatgatttcagatcctgttaccctttcaaaagatcatactttggctcaggctaaagaaacaatggcgaaatataaaatctccggacttcctgttgtagatgccgaaaatactttaatcgggataattaccaacagagatgtaaaatatcaggaaaatcttgagatgaaggtggaagagatcatgacgaaagaaaagctgattacttctgataaaaataccaatctggagaaagcgaaagaaattcttcttaaaaacagagtagaaaagcttccgatcgtagatgctgaaaataaactggtaggattaattaccattaaagatatcgacaatcagttagaatatccaaatgcgaacaaagatcagagcggaagattaatcgttggagcaggagtaggagtaggtgaagatacactggaaagaatcgaggcacttgtaaaagctggtgttgatatcatcggaatcgattcagctcacggacattccatcggagtcttaaataaaattaaagaaatccgacaggcttatcctgatctggatatcgttggaggaaatatcgtaacggctgaagctgctaaagatctaatcgaagccggagcaaatgttctaaaagtaggagtaggtcccggttcaatctgtacaacgagagtggttgcaggagttggagttcctcagttatccgcaatttacaatgtttacgaatatgcgaaaacaaagaacgtagctgtaattgcagacggaggaatcaagctttccggagatatcgtaaaagcgattgccagtggagcaggagccgtaatgttaggttcgcttttggcaggaactgatgaagctccgggtgaagaaattattttccagggtagaaaattcaagacttatcagggaatgggaagtctttctgcgatgaagagaggaggaaaagagagatatttccagagtgaggctaagaagttcgttccggaaggaatcgaaggtagagttccaagcaaaggatctctggaagaagtgattttccagttaacaggaggtctgagagcgggaatgggatattgtggcgctaaagatattgaagcgttacaaaacgatacaaaaatggtaatgatcacaggaagcggattgaaagaatctcacccgcacgatgtcatcatcacgcaggaagctccgaattattctttgtaataaattaaatatattttaaaagctatctcagtactgttgaggtagcttttttatttggtttttgtcctgattataaaaaaacctccgcttttggcgaaggtttatcacatataataaaatttttatttcttcacaaacttaaattcgtgagtctggaaatttttagtattaatcttcaaaagatagattcctgcgcttagttcagaaacgtttactttttcattaaattcttcagattttacaatttgtccggccatattgtagatctgaacagattttccgtcttttatccctgaaattttaataatctcagcaaccggattggggaagatctgaattttagaatcattgtttctcacatcagaagctgccagtgatgtactgtgcaaatctcccgtcatggtcgcattagaagtcgtaagatttcctccgcaacctccggcttgtgaagtaaatgatgtattctcaacccaagttccaaaagtaattgatggtggattttgtacgaaattattgttacccgtagaattatagtagattaagtttgggcttgaaaaagttccgtatccttcatcagcaaggaattcccatctgcttaatgtattgttccactgaattttaaattcgcaggttcctaagccgccacaaggttgtccgtctaaaggtgttgtaatatatatccctttattaaaggcgtctactcccgtttttgtaaaaacaaaattctgattatcaaatatattatgacaaccgttaaaggtgatcgtctgtgcaaaggcagaaccgctcaaagcaagacataaaagataaagagttttcatgctgatattttagaattgtgacgggaaaataccttgtaaagcaataatacacttcagagtaacgaaaggaggtctgttttcgtgtggctgtcctcctcctgtctggtttaccatcgtagatttcatggttgtatttgcagcagcatcagaatattctttatctaatccttttgtatcggcaggaagattattcgtaggagaattctgatttccttctgcggttacagcatttaccgtgtgtgagtgaggcggcatttgtgttacctgaagtgttacagattctgttcctccgctttgtcccatcgtgtagttggtaggtcctcccggagcctgtccttcgtgtaccaaaacccttcctctcatatcaggtaaagcgaatgttgtggttccgtttcctccgtaagtggttcctaaaagtgcaaataaagcctgattttgcgaaattggtaaaagctgtccgttacaggcagcccagtttttcggaacaaaattgtaaggtacgaatgcgatttgccctaaaaaaggctctgaagcttgtgcttttaaaacagaagtagatgccatgctcaatagcaatgtgcatcctaatacaagttttttcatgacgaataaattagttttaattaggtgttgtaaaggtagatattattctacatatttttgttatattaatgaaaaaaccttccagaggtttctgaaaggcttatattgttactaataataggttatttttgaagtttatctttaaagtcttctatcctgaaatctgttaaagcattgcctttttccactttttcttttgaatataatctgaaatcattttctgttttttctaaaagataatcgtaaggtccgacgtgggaaattaatttaaccaaaacaggagaaatttcaagacagataaaaagccccataatgaaagcggcagctaaaccaataatggctgaattttttcccagttcgtccaaagcctgtaatcttgctgcaaaaccattgaatttatcttcaaaagtctcggtagattttctctctgtttccagattggtatatactttagaaatttctttatctaaatattccagtctgggagcaacctgtttctgataattttccagatcaagtcttctctgttctttcagttcctgctttcgttttgcattgggaccgaaaccttctttcccgcttgttaatccagattgctttcctaaaatttctttttcaagctctacagaagcggaatcatacgatttttgatagttggcaatcttatcggagatttgtttcttttcagtctcaaaaggtccgctttgctgaaggattcttccgttcatctcaccctgaagctgttttttatttctctgaatgattgtattcagttgtttgtttacttccttttcaaaaattttaagttcaagaggtttagaaatgataattcctaaaaaagtcgctaaaattaatcttggaattgccattaaaatctgattccaccatgttcctgtctttttgatggaagaaacgatgtatcgatccagattaaaaatcattaaaccccataaaacaccgaagccaattgctgtccagatatcatcgaaaaccgtatacatcgcgtaccctgcggaaagtgttgcaaatacagccgtgaaaagtacaattcctccgattcccgcgaatttattccattcgctcggagtttttctcagaatatgaatgtttcctccggaacagaccatcagaaacttttggaaccagtttattttatgattcacctgatttatagtttgttggttgtttttcatgatagaaaatttatacaaatgtactactaaaaatcataccaatgtaaaagatagtattatgttttaccaagtatatttagtttttgatttaatcatatgtaaatcaattgtttaaaatcattaaatataaatttcttatctttatgtataatcactaaatatcaaaatatgaaaaatgtaatctgcctttctctggcaatggcttcgtttgcgcttacttcctgtaccaaagaaaaatcgatagataatgatctgaaagaagttgccgcaaacatcaacaaaacgacacctcagaatcttaccgacggagtgcgtctcgacagcgtttccgtacagccggggaaaatttttaaatataattataccctgactgacgatgtaaaagaaagtgtaagttctgaagaaattcaagtttttaaaaataatgcgaaagaaggagctttaagagttattaaaacttcaccggacattaaagaattcagagataatgatgtaacaatggtatatatgtattacgataagaacggaaaacccaccgcagatttcaaaattactcctgaagaatataaatcaaaataaacaaaacagtcactcacaaaatatttatctgtgagtgatttttatttcagccgatccggattttgttttaaaaagctttcccagccggtgtaagattttgtatctgcaatcgttccagaattgaaatgatgacataccgcaactgccaatccatcggaggcatcgagatattttgtgggaaattctttcagatttaaaagactttggagcattcctgcaacctgttctttactggcatttccgtttccggtgatcgccatttttattttttttggagaatattctgtaatcgggatgtttctgtgaagacttgccgccatcgcaaccccttgcgcgcgacctaatttcagcatactctgaacgttttttccgtagaaaggagcttcaagagcaacctcatcaggatgaaattcgtcaatcagcgccaaagttttatcaaaaatatatttaagtttggtttcgtggttcggatactttttcagcaataattcatggatggaaatcatttccatttttcctttttttatggaaataatcccaaaacccatcacggttgttcccgggtcgattcctaaaataatcttctctgcaatcattgctccaaagatatgaactttcagacttctaagaatgaaattttttgaatcatattttacagcagtcccagtttcttttctgcaataggaatccagttttcatcatgtcgaagcaaagtgattttgtcaactaagaatttagttttgtattttttttcttgatatttctcccatgctttcagatagttttcccacgtcagatttcgaaaacccaccgttacatgagggtggaaagaataattcataaagttgaatatttccttcacccgaagataaagatcattgagttgttcgttgttttcaggtttcacaaaaaccacaggatttttaggatgggcaaaacttccgaaaccattcagttcaatttcaaaaggagaaataacggtatcaatcttctggaaagcttccagaatgtcattttctaaagtaacctctctggaaaaaggcggaaacaaagtaatgtgcgcttcatttttcagagctttggaattgtcaaagtttaatgcaaagtcctgtttgaatatttttacttcttcaataattttttgtggcggataaatggcgatgaaatacatctttttcattgattgaaattaagaattttaaaattaattatgatgcataagaaaattatgtatagatttgctaggtataaaagatgagatattgaaaaagaacagtctttataaaggaaccctccaaaacatcatcctgaaacttcttgccaaggaagtgaagatgtatggataccagatcacgcagcgcgcgaaagaacttacgcagggtgaactggaaatgacggaaggtgcgctgtatccgcttttgcataagctggaagcggaaggaatgattttatctgaaatccagaagatcaacggaagagaccggaaatattatcttctgaccgaaaaagggaaaaagcagcaggcagagcaggaaacggaaatgaaaaattatttatttaacctcaatacgatttttaatatatgataaccaaagaacaggaacatcaaatagaattatatctgaattcaaaaaagctgactgctcagattttagctgaagtgaaagatcattttatttctcagatcagtcatctgatgatggatgaaagcttaagttttcccgaggcttttctgaaagctaaaatcagttggaagaatgagctggaaatggtaaacgcagattttctttcgttcaaaaaagtagccagaatcgaaaaagctattttacagcagaggtttagaaagattgccattttttctttcattcttgcaacagcagcaacatgcttgatgtttttaaatagggatgttttttttacacttcagattgtattattgggaagtttatcaattcttttggcatatagtttcattactaaaaagataaaattttccaattatatcgccatgagctttcatcctttactgcttagaaatcttcttttcggagtgctgatctttgcttttggatcttttataacagcagaaaactggaaaatcatggatatgaatgtttcaaaatttctgtcggtgtattctttggcggttcagcttcagttattgtatttcaattcaaagaaaattaatgttttagtttaaaatttaaaatgatgaataaagaacaggaaaaggagattacagattatctgatgcttcataggcttcctctggatattttgctggaagtgaaagatcatatgatttctcaggttgctgatattcagacagaagaaaatttaaattttcagaatgcttttcataaaacccggaaattgtgggaaagtgagtttaaaatgacgaaatattctgttttctacagtgaagaaattccggttattgtaaaaaaaatagcgaaagccagatacaataatattcttaaaaaatcattgttattgggattgatttcttttgctgtcaatattcttttgatttttttagccaataatgaggaagtttacagtactcttttcaaaatacaaaatggattgttcgttctatttacctttggagtatggttgtttaatcgtaaaatctggaaatatgtaaaacaggattttaaatacagaggcagacttttttattctatgtatcagcaaaatacaggcttgttggttgtttctatggcttcaatggctcaggtcatttccaagaaaggtgtttatccgtatctgtttttcagaactaacgatcacagcgaaattatttttgttctggcaacattagctattccttactgtatacaggtaataattattttcggtcttatcaattttttcgaacataaaaaatcattagaaaaaatgaaagactttctgaatgtttctgctgaataatctacattttcattgcatttccttttgaagaattcatctccgaaatggtactttccaaagcatctgtaatttttttgatctcaatgtgaggtttaaaagtaaatccttttccctgttcctcatcggcgatattagaaagaataataaccgaagtttttgtttccggataaaagatatttaatgaaggagaacctttaacgtaaccgctgtggaaaaatgccgccggttttccgatgttgctcataattccgtagccgtaacccattttcccgaaaatcgcatgatgtctttctgcgcttttagattcaaactttttcagtgtttcaggacggaggatttttccgctgtataaagcagtgttccacacatgaagatcgttaatggtggataaaattccgcctgcaggaactccgatatctttactggcgagtcttttcggcatattctggatcttttcgaatttttttctgttgcctaaataagctccggcaaagttttcgcccgcaaaagaagtcgcagttgaagaatgattcattccggctgttttaaataaatccaaaacattttcgtcatacgatttacccgaaactttttccacaatttttcccaatgtattaaaaccgtcgttggaataaaagaaatctgttccacttttaaactggagctttccgcccaaagtattcagtcccgaagtatggttcagaagctgatgaatggtaatgttttcgtaatttttattttgaaactcctttaaatacgttgaaactttatcgtctacattcagttttccctgttccatctgaagcagaattaaaacagcggtaaattgtttgcttacagaaccgatggcaaaaacagtactgtcattcatttttaactgatctctaaaatctgcaaagccctgattttttctgtacagttccaccgaatctttgaaaaccgccacacttccgttaaactgatattttttgaaaacagaatcgatctggtttttcagaagacctttttcaaaagcaatgatcgtactgtctgcaattgcctgtttgtccacttttctttcggaaggaataaatggaatctccttttgacaggaaactaaactaatggaaacagaagcacaaagagcaaagaaaagtaattttttaatcatttattgtttttctttcaggaagcaatttttatgcctctgtaacgaaaaagcctcctaattttcattaagaggctggttgtaaattattaaaaatgataattaaaatgataccgtatttacagtattggttgctgaagtggtaaaggtacttttaagcgttcctccggaagcagaataagttcctccggtgtataatccccatcctgaagttcctcctacatagcttccgccggtataacttccgccaaaataaactttataagtagtactgtttgcaagattcggactggaaaaatggaaataatacactccgtttttaggtttgaaggttaccatttccgttcccgaagcattttcaatatgcagcatagaagtggctgcaagctgtgcgctggatttcaggaacatacttacctgtgtggaagcagctcccattgctttagtcatacttgcattcgatcccgcagaaatcagaaaacctccgttcattaaaaaagttccgttgtaatcaattccttcttctggctgacttgtcggtccgtttacaatagttgttccgcctgtaatggtgatatttccgttactgtcgatcgcgtcgcttcctgctacgatattaattcctccagtaatgtacagatggctgttgtcattagactccgttcctcctgcaactgttccgtaggttgcattaattccgtcattggaagccgtaatattgtttactccgcctgctaaagtaatgatcggcgcttctacaccttcaccgactcccgaagtggaagaaattgcagaaaccgtatttgttccgccatttatggtaaccgatgcatccgaatgaatcccgtcatctgtagaattaaaggtgttgtttccattattgattgtaacggctccggttgcgaccaaagttttcggatgactgtaatctgttccggatactaaaaatctggctcctgtcgttttaatcagtaaaacaggatttcctgttgcgcttcctatcgttatcgttccgtctgcttttaagccttttcctcctgttcccgaacttgttgtcgtcaccgaacctgcattaatcagaagatttccgtctgctgtaatggcggaagaagaataggaatccaaaacgcccgttgtattggtgtaagtagctccgtttcctgccgttgtaatcgttaaatttccattattgactgtgatattctgagcggctgaaattccttttcctccgtttgccgtagaagctaaagaaagattgaaggttcctccgtttacaataacgcttgcatcggtttttatggctgtggaatacgaaggatcgtagccgcttcctgaagcggtaagaacggctgctcccgaaagtgaagcagtaatatttcctccgtcgaaagtaatatttccttttgcgctgatggctttcgattgtgcgcctgttaaagttaaattaaatgtgcctcccgaaattccgatggttgaagttcctgttttaattgcttttacatcggctgaagccaaagttgcggttacatttcctccagaaatagagattgctgtatctcctgcatcaattgcgtctccggttgctgtgatgtttaccgttccgctgctcattgcataaccttccgaatgaaaaccgtctgatgcggcagaagttaccgtaatatttccgttctgaacttcaattcctgccgaagtggaaacaccgtgttttttaattcctttaatgtttaaagttcctattcctgtaaaaattatttttccatcggtttgtaatgtcccgttttttgtgcttgaagaaccgtctgttaatgaatttgttgtccctgcctgaagggtaaaagtatgagtttgtccgccggtgatattaatggcagatccggaagcattggtaagatttaaattattcattacaaaacttgcgggaagagaagagctcattgtgagacttcctgttgtgcttgttcccagtaaattgtattctaaattattgatggttgcagtggaaacaacattcaccgttccgcctgttgccgtaatagtaaccccctgattagaataaggattgataatggttgcattttctgaacctttgtaaataatataaattttagttaagctaaccgcagtaggggagaatgttaaactgtcaacgatgcttttcggtaagtctaaacttgctgcagctccgttaatgtgaaattttgtataatttgagtcaaatttaatgctgtcgacaaccggagtaggggaagcatacatattgtttcccgaattatgcgccacaatattgctttgggcttttaatccaaaagacaaaataaacgcaattactatatataaatgctttctcattttttgatcagttttaaagttgtgttgttaacctgcaccagataaaagccttctctgaagctgctgatattgatgtcttcattgggttgataagttcccgacagaacaagtcttccttctgtagagtagattttcacctttaaagattcttttttgtctgatgttattctgatgaattctgcggatggattcgggtataacctgatctggtctttatttatcccgatttcctgagtggctaaaatagatgacgaaaaagtaattttccggataataccggtcgggatagaaatatcggaagcggaactcgcggttttcaccaacaaattgctgcctgaaaagtaaagttttccgctgttttcaatcgtgtagttctgtgtggaacccgtgtaataggtaacttttattgttgtctgtgcaaaggaaactgcagcaaacacaaataaaagcaaacacatcattttactgaaaggttttgctattttcattgtcaaattaatttatgtttcaaaattaatttttagttaacattgaagaaataatttgaggtaaacagtaaaaatgtgtcggtgaatgagaaatatttaattaaaataaatttttattgaaggattattattttacaaaaacaataaaaatgtcttttacaagatcattttcggtgaaaaatttagtataaggtttcgagatgtaatgaatatcgtatttgctgttgtacaaagaatagcttttgttgtacagtttgtaatcaagtctcttaccgtgtagaaaagcggaattattttacaatcagatcgcagaaccagaaaacatattcgtcatcttcgctgtcttcaccagatttcggtttcggataggtttttttaacaatttccccgatctcgaattcaacaggatttttaaaaagagggccgttaaaagtaaaagtatgaaattcaccattttctccgcatacatctacattttcaggtaaatctttaataaagtcttcatcaataattcttccggcaaaacttttatcgagataggtttcgttcacgcaggtaacaatggttttaaagccacgatctaaaaattcacggatgaggtcggttgtattgattttccataacggaaagactccttccattccgatggagcgtaactgatcttcgcggtatttctttaaatcttccagaaaaatatccccgaaaatagaatgggtaatgccttgagattgtatttccgtcatagttctgcccataatttcgcgatattcttccatagaaggttctttgggaagttccattttaattaaaggaaagcctagactttctgcctgtttttccaacagcgaaacatgaacgccgtgcatggagattctctgaaattctttattaatgcttgtaagcagagaggtgacttcaaatttttcttcctttaaaattttatataaagctaaagcagaatcttttccgctgctccagttgaagatggctttcggtttcatagttgaggtaatgtttttcaaaaataatcagattgattcagaattcagttgataattgaacatatttattgaaattatggttgtttgtactgtattatattattttaattaaatgttaataaaagttcatatataattttattttagtcagttgtaaggatttatggtgggtaataatgttatatatttgcacctgctaatttttgtgaccgtgaaaaagattttttttattctttctattttatttttgagcgagatgaatgctcagaatgttgggatcaattcgcttacaccgcaaatgactctggatgtgaacggagtagcttctaccgttaccaaagcagacggaatgagagcgcccagaataacgttggctcagctaaatgcaaagacagggtataactctaatcatgtaggtgctttactttatattacggatgttacaggaggttccacggtatctgcaacagcacagatcgcgacggttggatattactattttgatggtaccgcatggcaatctgtagttgctaaaacaggaacagcggtttttattgcttcactgggaagcggaaatggttctgcaacagcggctagtatcaattccggtggttttaccacggttcctctttcaaccgtaactaaaaatgtaggcggaggaatctggagtcctgcaaccagcacgtatactgttccaagttcgggaacctatatcattaaatcgagtatcagacttgtagatggaagtccaagtagaaatgtgtttcaggcggtacatactgtaaattcagatattcccgaaggaatctgggacacgaattccggaaaccgctggacaatgttgtatacaagaattgcctattttaacaaaaatgatcagttaagactttatatgtattctgacggagcaacggctaatatttctgacgcttctctgaatattgttttgctaagccagaactaaagtccttttgaaataaaataaacccctcatagaatttctttgaggggtttgttgttaaaaaacatttattaatattttttcgactgaatttctttaacgggaataaatgctccgttaatataatctattttctgttcaaaaggataagccggatttgatgtcattaagactcccacaacaccgaaaaacattccgatactcaaatttccgatattgggacttccggatcttaattttccgacgaaataataatcgttgtctcttttttctgccttcgtgaaaagattttcgataggaagataaacatacaattcccctttgtaaacaagggcatacacatcatctttctttatttctttttcttttccgtctgctgtttcaaatattctgtgaattttgggttggtttccgtaaaatttaacgctgctgatttcctgttgaggctgctggtttttcagagaagtataatctttgtacagtccgtctttcaattcagaagaattaaagagactgattgactgtttatagatatcatcaaaatttttaagctgttcccatgcgtaacgctctgttgtattaggttttctggatacatttttagcaataaattctcccagcatttcgctgccttttcttaggatttctttcgttacatcggctgatttatgctctgtcacagtatctgttttttcaagtaaagaataggttccgtcatcattttttgcaaaaaggaaaccctggaaataacaatacccaaattctgtgaatgcttttgagacttcagcaaaatacaattgtttaagatataaaaccagacttccgttttctgcattttctccgtttatgctgtttagaacattttgaaactgatcagaaaggggagacgtaggaaccactctggcttttgcgttcaatgcgccctgctgcacaattccaacggctgttgtatcaattctggcatcaataattgtaatggttttataatagcttttctctgctttttgaaaaggcgggataatcgtaaaatcttctgttcgcttctgtgcgaataaaatggcagataaacataggaatacaaatagtacattttttcttaaaaatattttcatgattgttgtttattttatttttactaacggtttaaatggatgattagtctataaaagtacaaaaacctcaaagaaaattccctgaggtttgatttataagtcttaaaaaaggtagctgagcgaagtcgaagctacatatttcttctgtactttccacccacttcaaacaaagcattggtaatctgtccaagagagcagtatttcacagcatccatcatcacttcgaataagttttgctgattgatcgcggcgtgttgcagcgttttcagagcggcttccgatttgtcttcattggatttctggaaattatgaagcatttcaatctggaattgcttttcttcctctgttgaacggatgacttctcccggacgaaccgttggcgaaccgtcttttcctaagaacgtgttcactccgataatcggatattctccggtgtgtttcagccattcgtaatgcattgattcttcctggatttttgaacgttggtacattgtttccatcgcacccaaaacgccacctctttctgtaattctgtcgaattctgcgtaaacagcttcttccaccaaatccgtcaattcttcaataataaatgaaccctgaagcggattttcatttttcgccaatcctaactctttattgataatcaactgaattgccatcgctcttcttacggattgctcagtcggagttgtaattgcctcgtcataagcgttggtgtgcaatgaattacagttgtcgtaaattgcatacaacgcctgtaaagtggttctgatatcgttgaaatcaatttcctgagcgtgaagagaacgtcccgaagtctggatgtggtatttcaacatctggcttctttcgtcggctccgtatttcagtttcatcgcttttgcccagattcttcttgccacacgtccgataactgaatactcagggtcgataccattggaaaagaagaacgataagttcggtgcaaaatcgttgatatccattcctcttgacagataatattcaacatacgtgaaaccatttgccaaagtaaatgccaactgagaaaccggattggctcccgcttccgcaatgtgatatcctgaaatggaaacagagtagaagtttcttactttttctttgatgaaatattcctgaacgtcgcccattaatctcaaagcaaattccgtagagaaaatacaggtattttgcgcctgatcttcttttaaaatatctgcctgaacagttccacgaacggttgcaatggttttcgctttaatttctgcatacacatcggcaggaatgacttcatctcctgtaattcccagtagttttaaacctaaaccgttattggaaggaggcaattctccgttgtattttggtctttctaaacctttatcgtcgaatttcgctttcaaaacttcctcaacctttgcttcaagcttatgctcaacaatatatttctccacattctgatcgatcgctgcattcataaagaaagccaacaacattggagccggaccgttaatcgtcattgaaaccgaagttagtgcattcaccagatcaaatcctgaatacagttttttagcatcatccaaagtcgcaatagaaactcccgcatttccgattttaccataaatatccggcggtaaagctgggtcttgtccgtaaagagttaccgagtcaaaagccgtagataaacgttttgcaggcatttccgcagaaacatagtggaatcttctgttggttctttcaggacctccttctccggcaaacattcttgttggatcttctccggttcttttgaaaggataaattcccgcagtgtatgggaaacttcccggaagattttcctgtcctttccatttaatcagatcgccccagtcgttgtatttcggtaaagaaattttcggaattcttaggtgagataaagattctgttgaggtttcaaccttaatttcttttcctcttacgaaataggaataaaattcagctttgaaagcctctttcgtatcatcccatgtttttaggaagtcgatgttttcctgctgaagttccttttcagctttctgatattcagtatctaatgtttcattggaaaggaaatttttaacgccttcaatatgatacatttttcttgccaactcagcctgtttttcaacattcgcatcgtattgtctgttgttttcaacaatttcggaaagataacgcactctttttggcggaataatcgttacttcgtctgtaatttcctgttcaacaaatgtttttaaatttaaatcagcaaatttatcgttgactttagaaactagtctgttgtataattccgttgttccgtgatcgttgaactgagatgcttttgtagcatacacaggcatttcatccaatggctgttcccataaaagatggtttctctggaactgttttcttacggcttgaagggcatcaagagcgccacgtttgtcagatttatttaaagccaccaaatctgcataatccaacatatcgattttttccaactgtgtggaagctccatattccggagtcatcacatacatcgaaacatccgcaaaatcggaaacttccgatccggattgtccgatacccgaagtttcaaggataataacatcaggatgagccagtttcaaaacatttaatgcagagtgaatgaacggagaaacagaaacgttgttttctctcgttgccattgaacgcatatacactcttggatcattgatcgcgttcatacggattctgtcccccaaaagtgcacctcctgttttcttttttgaagggtcgatggagataattgcaatttttttatcggtgtttgaacgcaggaaacgtcttaccaattcgtctgttaaggatgattttccggctcctccggttcctgtgatcccgataatcggaatatgtaagtcttttgatttttcgtcgatcgcttttaccagttccggtttttcttccgagaagttttcaactgcagaaatgattttagcaatgcttgtagaattttcaaaactgatggaatctaaatcactaactcctacatcttttccggtggcaaagtctgatttttgaaccaaatcatcaatcattccctgcaaaccaagttcacggccatcatccggagaataaattcggtcgattccgtaagacatgatatcttcgatttcttccggcagaattacaccgccgccgccgccaaaaattttaatctgtggcgaatttttttctcttaaaagatcgtaaatgtatttaaaatattcgttatgaccgccctgataagaagttaacgcaatagcgtttgcatcttcctgaatggctgtgtttacaacttcttctgccgatttgtcgtgtccaaggtggataacttcgcatcctgttccctgaatgacacggcgcataatattaatggcagcatcatgaccgtcgaatagcgacgcagccgtcacgattctgactttattttttggagtatatttttgggtttccataaaagatttagaaaatttctgaatttccaaatataataataaaatagaaacccgatgtttaatgttaatgcattgtaaatgattaagttaatttgctgtgattaaatatttgaacctcatttaaactaacatttgttagaaatgataactacttagaagttacgccgctgatttctcagaaaatctttcacagaatgatatcattaatttctataattttgcatcatataaattaggtatgaaaaaggcattgctgtattttgcgttgggaacggttttaagttttttaattaattatttcttttacagctcagaaaatatcgggctcgatatttattatgccattgcctttggcttcgcatggggaattgcttattatttagataccccggattttactttgcctcagaaattaggattatcttttgttgccatgggaatcttagttcttgtgggaactttaatttttaatctggaactggctattccttccgttctgaaattttcgacggtttttgtggcgtattatttaattgcaagcttcagagcaaacaaaacactgcgcaattaatgcatcgtcataaaacttacatacatcaatagaaggaacatacagaaaagtccgaataaattgacaataaataaaagaattcctttcattacactaatacttcgtgcatttttgtaaactctgtgatgcgctataaagaaatatacaagcatataaatgacggccgcggaatagagtgaaaatgttaaagtgttgaaaatcgtattatccggaagtaatgaagtaagttccgaaatggttatgatgatcagaattcctaacagcagaaaggaaaaataatgaagtgtgaaaataccatgatcaaaataccaccatttctttttattgtggaaaagccagagaaagaaagcaaaaattggaagataaacaaataatgctttcggaagggtgtgaacaatattttcagtgaatttttcaaagatctggtcttttttcaatccctgttcctgaaagtgaaatattttttttgcataaggttttaaaaatgcaaatacggcttttttatcctgatttttaaggcttaaagaatcgaactgcttcatggtagtagctcccagaatgctcatttttccatcggctgtttgtgtaaaagtatcctcttcaggatcgggagtattttttttgctgccaatttccagtcctttttccatcttagaactagataaatcctcttttatcagttgatctttttggagtgaatgtttcagactgtctgtgaatcttgcaatcttttcgtcctgttctttttcttttaaaatctgttctttcttttcatggtctgaaagttcctcttccgaacttgaaaatagagtagggaggaaaaaagtaataaaactgataaaaatatacagttttacaggagccacatacatttgtctctttccggcaaggtattctttagttaattctcccggacgaatgagtaaatatttcattgttttccagaactgtccgtcataatgcgtgaagtcttcaatgaaatgcgtgaaaagataatgaaacggttgtttaggttccgtattttcctgtccgcagtgtgggcagaatctttcttcaacagcgtgtccgcagttaagacacgttttatcttctctaatttttccgtggctcatgatatcaatatggatttcagcaaatataattatttaaagaaattaaataatcatattgatatggttttggatgaaagtttaaatttaattgatagttattattgaaatttgattgatttttaaatgatttttaaatttgtaagtaaatttttcaattggaattttcttgtttttttaattgtttttatacgattaagtctttcaggtacttaggcttaaacacataatcagcagattaaacgaaatatgtttttgcattctaaaaataatttgtacctttgcacacccttttaggggaaaattatgtttaatctttaactaaaacgtgtgaatacattaagttacaaaactgtttcagcgaacaaagctactgctaataaagaatgggttgtggtagacgctgaaggacaaccgttgggaagactagcttctacggttgcaaagattttgagaggtaagcacaaaacgaactacacacctcacgtagattgtggtgataacgtaatcgttttgaacgctgggaaagtaactctttccggaaacaagtggaacgacaagacttatatctggcatacaggttaccctggaggacagaagtctatgactgcggctgaacttcaaaagaaagattctttaaaagtattggaaaaatcagtaaaaggaatgttgcctaaaaacagacttggagctgcgatccttaagaatctttacttatacgaaggaactgagcacaaacatgaagctcaacagcctaaaacaattaatgttaacgaatttaaataattaatatgtctacagttcacaaaatcggaagaagaaaaacttctgtagcaagagtttatgtaaagccaggaactggtaacattacagtaaacggtaaagacgctaaagaatacttctctacagatgtaatggtttacaaattaaaccaaccatttatcctttctgaaactgttggtcagtatgacgttaccgtaaacgtattcggtggtggaaatacaggtcaggcagaagctatcagattaggtatttcaagagctttatgcgagatcaacgctgagttcagattagcattgaagcctgctggtttacttacaagagacgcaagaatggtggaaagaaagaagccaggtcagaaaaaagcaagaaagagattccaattctcaaaacgttaagatttgctgttggcgaatggcttatggttgtttgctacagaaatgtattaatttttatttaaacttaatctcggcgaaaagccaattgccacaagcaaaaagccaaccgccaattgcccgttacgtttagcatccaaacgcttctcccatctaaagaagttgttgattgtttaaaagacggaaagtaaactaacaaaaacaaaaaacatggcaaaagcaaatgtaaaagaccttctagaggctggtgtacacttcggtcacatgactagaaagtggaatccaaatatggctccatacatttttatggagaaaaatggtattcacattgtagacttacataaaacagctgttaaattggatgaagcttgtaacgctttagaaaaattaacttctgcaggtaaaaaagttcttttcgtagctactaagaagcaggcgaaagaagtggttgcaaaacacgcttctgaacttaatatgccttatattacagaaagatggccgggtggtatgctaacaaactttgttactatcagaaaggctgttaaaaaaatgaactctatcgacaaaatgaaaaaagatggaacgttcgaaactttatctaaaaaagaaagattacaggtagacagacaaagagctaaccttgagaagaacttaggttctatcgcagacatggtgagacttccatctgctgtattcgtagtagatatcatgagagaacacatcgcggtaactgaagctaagaaattaggtattccggttttcggtattgttgataccaactctgacccaagaaaagtagacttcgttatcccaggaaacgatgatgcttctaaatctatcgatatgattcttagcgtagtttctgaatctatcaaagaaggtcagtctcaaagaaaagctgataaagaaaaatctaaagaagaaggagaagtagtatctgctgataaagatgctgactttgatgctgaataattaaagattttctttaaaatataaagaccgctaagttttagcggtctttttttgtttttaataaagcttcctgttaatttgaaaccgtcacattataagacgaactgataaactttgttttctggtataccgaattgcaaaccattcccgaaatattataattctgatttttcggaaccattgccgagccgattttattggcaccaatagggattttcttaaaataattatttccgctaatcgtaagaaccatattgcagcgggaattattctcaacagtaattgatgtattcgggctgtcttcggagccgtttaaaagatccgttaaaactgccgccgtttcagatttgtacgtttttagtaaagtctgatattctaattccgtttgattggcagtagaggttctgctaacagtatttggatttgtatgaggattttttacagcatcgttgtttgtcctgtaatgagtagtctcacaactgtttaagacaatgatgatcataagcgtaaaagaaaaaagctttttcataacaaaattttcttggtgtaaatttaaaacttttacttactcgcccgtcataatttattttccagtctgaacaggattattaatggttaaaaaaatactttttttaatttctttctgtgaggaatataaaacatcacagacatggctcgttaaagtataacttcctttattaatcacaatagaattttctcctttcgccggtactgcaagattatagaaatcttttccctgaattcttaaaacgatattacagtcagaattatttttaaacaaaagaatcacttctttgctgctgatatcttcattaaacatcgcattaagcagttttacggttttctctttatgttcagcgggtgtagcagcaatcaggcgtttaaattcttctgtttcctgtgcattagaattcttcatcagagtagtggagatctcagaaataacaggtcttgcttccatcggtttggcatccttttttcctttgatccactccgagtttttcaaggcaattattttagattttaatacgtttcttttaggatcatccggatgtgcggttttcaggaaatcttcaatttcgctgatatttttactttctaaaatattctgggatttattttgttcctgaacgctgctgcagcatataagaaatcccgtcgaaataatcaacattacttttttcataacttatctttttgtgtttatacgtgaaaatacaaggatgtaaaatagtacagcctttagttgtttatgtgaattttatcacctaaaaattaccgataagttaaatttgtaaagtgtctggaaatgctgagtttcttttcatcgtgtgtgtttgtttgttagttaattctgaatttaatatacgttattgttttcccttttgcagagaaaagctcttcataatatgttttaatatcccttagatgcggtgtattcggatcatactccaaggctccgtaaatatcgtggtgtgcagtaatgatttcataacctgccccttgtaaaaatcctaaagtgtagccgtgaagaaattctgaatctgtttttaaatggataattccgccgggtttcaagaatttcttatatctttctaaaaagtcaggatgcgttaatctgtgttttgtacgcttatatttaatttgcggatccggaaatgtaatccagatttcatccacttcattttctccgaaaaaataatcaacgagttcaatctgggttctcagaaaagccacattcttcatgtcgttttctacagcttccttggctccgaaccagaatcttgcccctttaatatcaattccgataaaatttttctcagggaatgtttttgcaagacctaccgaatattctccctttccgcagcctaactccaaaacgatgggatggtcgtttttaaagaaatctgttctccattttcctttaagatcgaaaccatttaaagcatcttctctagttggctgaataacatttggtaatatcttgttttctgcgaatcttgctaatttatttttacccatgagacatttataaaatcctgcaaaaataactaattttagacaaatgctccatttttaaacctgaaaataacagctaactgcattattttctcatagagcttcctaaagcaaccataattggtttctggatggttttttgtgaggcgtactgagctccgcagactatactcgtaaaaagataatcgcctttctgtaccacaatcgaattatctccgtgcgaaggaacaggaagcctgtactttgtagttccgattccttctattcgtacaataatattacagtccgatttattttcgatcatcacaatacattctttcgcattggggtcgttatcgaaaagagagtttagaatttttaccgttttgtttttatgttccgtcggattttccgccatcagcatattaaattcagaagcttccgcatcaggaatggcagcaacaggttttgtgtttgcggatgtggtggaaggagcagaaggagcaatgtatacgtttttaggattgcttggtgtgtacactaccgcagattgccccacctgcaattctttctgatattttgcaatctgtttctgcttaatgatagcattcatctcatcaaaagatattttggttgaaggtcttctcttcagcatagcaagccagtcctgcatttgctttactttctggtcaccgggttgagcattttttatgtattctttcatcatttccatcacacggggcttaagtacagatcttcgcggatcatcgggatgagcatctctcaggaaagcattaatttcgtaaatatttttactctttaaaatttcactgtaatctttccctttcgactgagcggaaagagtgatgcacagaatcatactaaaaaatataaataactttttcattcactgctattaaagtgtaaaagtaaaatattttctcgtttaattaatttattttcaagacattagtatccaaaattgcagcgaaaattacaccaactgtaatgaacaatcaattttttctaaatttaaaaattattttaagtaaaacaaaaaaatgtacatatcacttagaaaatgtacattttttttattcgtatgatggaaatttttatttcagaacatcctgaagatgagaattccttaatcttctctggtaaatcggaagatatttttcaatcggaatttttatcgcctcaaaatttccggcaagaacataaggttcgatattttctgaagtatagacaaactgcaggaagttatcaattaagttttcaggaattttgaatttcgtgaaataatcttttcctaaataatttttaatctgcgttacagaattattcattctttcgtaggctacataacgttgttttttctttctttctccggatagaatatcataaatgctttccaggctgaaggtaagtccgccatcgcgaagacctgcaacaggaagctgcggcggagttccatctcctttaggttccggaagaccaatgacttttttaatcgctaaagccttatcttcttttctgattgaattaacatcataacgtaagtttccggtaggcttaaacctgctgatgatgacttcctgaatatcgtgatacgccactttcagttcaaccagatttttctgatccatcatctggggcgtcagcttaatatcttttcgctctgtaataatcgacgtaaaacggatcacatctccaggattggcagagatagaaaaatcaccattataatcgcttaaaacagttttcagggtattaagattcgtaacatacatctggttcagatacaaaacagaattatcttttagaaaaacttctccggagtatgtttgtgcgttaatttttgccagaaaaaccaacagcagcagagtaaatagcttcttcatataataccgcaaaattacgcagaaaaccaacaagctatacctattttagtagtgaaaacaggttaaagttatattaaactttaatgaggaattgttaatgaatgttataaggatgcacttaaatataaaatgtgtgaaaatttttaatgatttttcattccgattaataattctttaccaaaagccaactcgtatattttacagtggttgtacctccaaattccgtccagcttatgaaataccagtacgttgctgtgtttaccagtcttcctccgactcttccgtcccaggtaaatctgttggaaggcgctcctcgaaatacctctgctccataacggtcaaaaattctaaagataatgttgtcattattcattaattcagaataatttatagtatcattatagccatcaagattaggcgtaattgtattgataagattaataataacaaatggtctggtcacttcctcgcactgattggtgtcccgaatgtggataatatgatttcccctcggaacattcatgaaaacatttgaactctgccagtttacgccatccagagaatattcgtaaggcggagtgccaccgcttgctccgatcgttaccgtacttccgtttatttcaatcatcgtgataaccggaagagaagattctgtaacggttacactttgtctgtaagtacagccttctgcagtaagatctacccaataatttccgggcgcaacatttccgatggaagaagttgttgctccggtactccacaaataactgtcgaatcccggtcctgcatctaaagtcgtcagtgttttagggcaaactactttatctttcagaataagtgatgattttggtgtttttatcgtaacagtaattgaagcaatatttggacaaactccggatttctcaaatcttataaaaatagtctgcgttcctgataaattcattggatttacaatctgcgccgtgctgttctgagcatccggaagagtagggtgaaaagttacggtaacagaaggatctgttgtaaactgactgatataaggcattaaatcaattgattttgtaccgtccagattatcatcacacatggtgatggcgtgtgtggttttaattaaagaaattttatttccgataacaaaaacaagcggctttacaacaggaggacaaccgtccggagaatctactcttatataaattgtagtggtggttgtgtaagaccagttattcggtaaagtatttgcgtttccggcattggcatctgctaagttggcgtaatatcttacattcgtaaaataagtcggattgtttaaaacaagaggggtgatgttaggcagaattacattcaccacgccgtccagattatcatcacaaaaagttccggtataattattaagaacgttggcaaaaggataaagattaagcgtaatctgggcaatagctttacatccaagtgtattttttaccacggcatacacaatggttccgtttgttgcggtataagaagtcgtattggtaattgcggttcccggagtttcgttctgggcatccaacagattcgtatagtaggtaatggttaccggagaattgctggtaacattggctgttgttaaattaaatattccctgtcccgatccattatcacagacatttaacgttgcattatttactgttaaaacctgaatgttaatagtaacagttacagtttcgcagtcagggaaatcaggattgtttccgcagaatgtatacgtgaaagtgtctgttcctgcagttccgggattcgtaacggtataagtaatgactcctgtcgttgcatttacggttgccgttcctaaagtcggagcggtaagcactgcgactgtagaaggaaccggagtctgggtagaactggtaaatgcaggagtaattgtttttgtggtacagacatcataggtcgcggtagacagttttgtacagttctgtaccttgtactgtgccgtgattaatggagcacagcttcccatcgttaccgaacaggtgtaatagccggactgagtgggtgagtaagaagctcctgttgctcccggaattaaaactccgccaacgtaccattgataggtgtcataaattacaggatctactgtaagaataattcccggagcgcagtctccaccggattttaaaatgacaggctgtgtgggaaatcctgcgaaaaatccgccatatcctaccgcatcacttcctgcgttgattcccgctgttatcgctttagacgaaacaacggttactgttcctgcagtattcggaatgccgtaagttacccagttaagagttcccgtcatattgaaaggtcctgttgtagccggaggagtaactccgtttacggtaaccactgcacctctttccgtaataaggtttagtttcgtgggaacatttaaaataccattcgggtttccattggagtagacaaagttttcatcaatcaatccgagttcattaatctgtttcggtaaataacagttgagtgccggaataaaattgaatccaccggttgccacttcgtttcctgcggtactcgcacccgcaagaacctgataaatataagcgtttttggttgttttgatgtataaattataatgtccgcttccctgaagctgatatttggagtccggaatcatgaaatactgtcccgtgtttaaagtggcaataggaacaacttcattatttacacggatttctgtattgtcttcggtggcaattaccaaagcgccttccatattcgaaccgatgcttccgttaccttttaccaaagcaaattcatttcccaaacgatctacgggaaccgactgatccatgaggatatcagaactctgaggatagtttcctgcatattgtccgttgaaatttccattggtaacgttaatgtttttattggctgtaattttagcacctataaatccgtcaaagtttcctgtaatatttccgattccgtcgatgatgtaggattgccctttatttaaattaaacgtaatggtaggattggttgctcccgttgttccgttggaaaactgtacagtgggtttatatcctgttatggtaaccgtagtattgtcttcagttgccagaacgctcgtcataaaattcaggatagaattacttacagagaggggagcattggctgcgtaaaaagtttttccggtggaaggaattcctttggatgtaataatttcagcgtgattaaatactgaaaatcttaagttggcgtaaaagggaaattctgcttttacataaagtcctttagttgtcgtcgtaaaaagatctgtctgcagtgacgtaataatataatctcttaagatatcaactttttgaggatttcctttgctgatcgttgctgtggcaattaaagtgttgttgttataaatttctaccggaaaaggggtggtacggttagtagaaagatatagtttctgattggggtttgaatttcctgtgcggtctaccatgggcgcaaaccagtgttctctatccaattgtgccagagtagaggtgaaaaagagaagtaaaaacagaaaagataaaattttcttcattcagatattgcctttaacacaaatttaataataaaaagcattctgagcttaaaaaaataaaaaaaaccatgatatcaaaatcatggttttcagagtattatttaaagaaatatataagcttaatttctgtttttcactaagatccatccggaatatttaatcggggtctgtttgccgtttggctcgttccagcttacatcgtaccagtagtttcctgtaggtatttttttaccgcctactgagccgtcccatttatatccgttttccttatttccttcatgcatttttgtaccatatctgtcgtaaatattgaacacaaggtttttcttgtttcctaaagcagaataatcaattacatcatttacgccatctccgttcggagtaattacgttaataagattcggtacggtaacttctacctgcattggattacagttgtaagaatcttttacatagaatgtattatttcctctcggaacattggtaaatacattggaatcctgccaatgaatattatcaatagagtattgataaggagctgttcctcccaatacatttaccgtaacggtattattggaaatatcaatgcttgaaataacaggctgctccgaagcatatacttttaccgtttgtctcgttacacaatttcctgttttcagatctacccagtaagttcctgtggtaacgttactgatcgactgtgttgttgcacctgtactccataaatacgctgtaaatcctggacctgcatctaaagttgttttattttcaatacagataatcttctcctgcaaaatgctggaatataccggaggaagaacaattaaagtaactttagctattctgaaacatccgtttgcgttgcttactttcacaaaaacgactccgttgggtgcaacatagttcgccggattgaggatttcattggttccgagctgtgcatccgttaaagaaggataatatttttttgtaattcctgtagtggtagatacaagagctgttgtaaggtcaaataatgccgtagcaggattagacggaataaaacatgatctcagtgttgcatccgttacagtagggcttgcagaaacggtaaacgttaaagttacctgctcacaatctgtaaaatcaggatcgtttccacagaatttgtaaactattgtatctgtacctgtaaaaccaaaagttggggtgtagataattactccattaggatcaataacagcagaaccatttgctggaggcgtaacaatcgttaccgtactcggaacatacgtctgtgtagaatttgtaaaggcaggaactaccgcctgataaccctcacaaaccgtaagcgctttcgtagactgctgaagacaggtatacactttatagacaggagttattgcaggaacacaagatcctactgtaattcttacggtgtaatttcctgctactgtcggcgtataactgtttgaattggctcccggaatagggtttccgttcagataccactgataggtttcatagctgtcatcaacctcaagaacaattcccggaatacagtctccggtttgttttgtaattaaaggaatggaagagaatcccgcaaaataacctccataaccagccgtgctgtaacctccattcactcccgcagttaccgctttggtggaggttaccgttacatttccggtaattcctgtaatagcataagttacccagttggtgtttcctgttaaaggataaggtccctgcgcagcggttggagttgctccattcaccgtaacagccgctcctgcttctgtaagaatattaagcttcatggttacccccgaaacacttggcatttcgttgatctttccgatctcatcaatttttctcggaaggaagcagttcaaaggcggaatataattgtatcctccggtgttattttctgttcctacaccaactaattgatacaagtatacatttttagaagttgaaataaacatattgaaatgtccgcttgctcctccctgctgaatgtaattggtttcattaattctataccattctccggcattaattgttgcgataggtgcagtagctccgttaatgaaaatctgagtgttatcttctgtggctatcacaattccaccctccatgttttcggcaggagcggtagatcttgtttttaccatagcaaaagtattcccaagtctttccaccggaaccgactggtccataattaaatctgaaccgcttgaacttaatgctccgaaattaccgttagaacttccgttggttaaggtaatgggtttatctgaaactattttggctccgataaatccagtaagatttgctgcggtgccattatttcctgccatgatgtaagacttccctttattaagggtaaaagtgtgggtattggttccggaaggagatcctcctaaaaagaccaatcctgaagtattccatgtaacggtaacctgtgtattgtcttccgttgcaagaattcccgcagtaaaattgttggaagtaccggttcctgcattggtatttggtgggttggctacaaagaataatttcccgattcctgctttacctttggatgtaataatttctccgtgagaagattgtgcagacctcaatgtacagtaaaaaggcttgtctcccttcagataaattccttttgtaatgatctgcaatgcttccgaagcggttgttgcgctaataagattggcagaaacagtatacgattgaggatttcctttgctgatggtaacggtcgttagcaaagtattattgttataaatttttacatcaaaaggagtggtggagtctgttgaaagatataccgcattggtatatcctgttgtggatgcatagtaaggtgcaatccagtgctccgtatccctctgtgcaaaaagagtactcatgccgaaaagcatcagtacaaaagacagtagaattttattcataaattgttgaattaggattcatgcaaaaataatggaattttctaaacatattcaaattatgtttttaaatgtgataatatattgtcacaaaaaagccacgatttttgatcgtggctttaagattcagtttttgtattgcttagtcaatatttttaacaaggatccaacctgaatatttaattggtgttttttccttgttcggttcgttccagttgatgtgataccaataggttccggtaagtattttcttgtcgaaatgtttaccgtcccatttgtaattgttgaatttatctcctgtgaaaattttatttccgtatcggtcgtagatcacgaagcttaaattttccttgtacgccagttcgctgtaatcgatgaagtcatttttattatccccattcggcgtgatggcgtttaacaaattcggaaccgttacctctacaaagatcggggtacagttgtaggcatctttcacatagaaaatatgctgtcctcttgaaagtcccgtgaatacgttagaatcctgccagtttgtaggcgaatccactgcatatttataaggcgcttttcctcctgtcacttttaccgttgccgtattgtttgaaatttcaatttccgaaatcacaggatccactgcttttttcacgcttacaaactgtttcacagagcatccgttgtctttaaggatgacccagtaatctcctaccggcactcctgataatacctgagtggttgcccctgtattccacaggtaagactgatatcccggtcctgcatcaagatttgttcttccgtcgatacagatgatcttatccacaagaaccgtagatctttttggaggaatcaccactaagtttactttggcaattgcataacatccgttggaattgtacactctgatgtaaaccgaagcattccctgaaacatatgctaaaggattcaggatttcattggttccgttgcttgcgtcaacaaaagtcgggtagtattttttggtgattggtgattccgaagacacattggcaagcgaaaggttgaatgccgcttttgtttcgttattttcaagataacattcgctgatggtggcttcagttaccaccggagtcggaaggtaggccagagtaattttagcgtttcctgtacatccttcattggttgttacttttacatagacaattcctgctgcggaaagataattggcaggagttgtaatttcgttggttgctgcattcagatcagcaagggtaggatagaatttcttcaccaccggtgaatatgtcgttacattggctgcggtaagatcaaagaatccttttccgttgtactgacaggctttgatggtggtgtccgttaaaataaacggaaccactgtaagatttaaagttaccttttcacagtcaataaattcgggagcatttccgcagaactggtaaacaatagtatcaggacctaaatatcccggattcggaatgtaggtaatctgtcctgcgccgtttactgttgctgtaccgtttgtcggataggtaagaatggttaccgtacttgcaacaggcgtctgtgttgtggtgaacgagaaagctggagtaatgacttttgttgcacaggcattaagagctgttgttgtatttcttacacatgaaaaaactttatagatgggagtggtaacaggcggacaggttcccatggttactttcacagtatagtttccagctacggtaggcgtataaacgttttgtgttgctccggtgatcgggtttccgttcagataccactggtagctttcatagctgtcatcaacctcaaggataatccccggaatacagtctcctgtctgttttgcaattaaaggaatagaagagaatcctgcaaaatacccaccgtatcctgcggtgctgtaacctccgtttactccggctgttactgctttcgttgaggttaccgtaacgtttcctgtcgggttatcaatagcataggttacccagttggtgtttcctgttaaaggataaggtccctgagcggcggttggagtggtagccggtccaccgtcgatgctgtacgtaacagccgctcctgtttcagttaggatatttaactttaaagtaattccggaaattcccggcatctcgttgatctttccgatctcatcgatttttcttggaaggaagcagtttaaaggcgggatataattgtatcctcctgtattgtttgaagtacctactcctactaattgatacaaatatacatttttagaagtagagactaacatattgaaatgtccgcttgtaccttgctgaatgtaattcgtttcattaattctaaaccactctccggcattgattgttgctagtggagtcgttcctccattcacaaatatctgggtattgtcttctgtggctatcacaattccaccctccatgttttcggcaggagcggtagatcttgtttttaccattgcaaaagtattccccagtctttccaccggaaccgactggtccataattaaatctgaaccgcccgaacctcctgctccaaagtttccgttggcgcttccgttggttaaactaatgggcttatctgaaactattttggctccgataaatcccgtaaggtttgccggagtactattattcccggctaaaatataagactgtcctttatttaaagtaaaggtttgagtatttcctgtaaaagtggctggagcacctatgaattgaattcctgaggttgtccaggttactgtaactgatgtattgtcttctgtagcgagaactcctgctgtaaaattgttgcccgatccggttcctgcggttgtattgggtgcattagctgcaaagaataatttcccgattcctgctttgcctttcgaggttattatttcaccatgagcggtctgagcagatcttagagtacagtaaaatggcttatcacctttcagataaagccctttattgattacagtaaaagcatctgttgtagctgtagctgttatatttacaagaggaaccgaatacgtttgaggatttcctttgctgatggtaacagtagtaagcagtgcattgttgctgtagattttcacatcaaacggggtagtagagtcagtagaaagatataccgcattggtatatcctgttgtggatgcatagtaaggtgcaatccagtgctccgtatccctctgtgcaaaaagagtactcatgccgaaaagcatcagtacaaaagacagtagaattttattcataattatagaattaggattcttgcaaaaataacagaatatttaatatgttcttaataatatttccaaaaaaattgttataaatacgtaaaaaagccacgatttttgatcgtggctttaagattcagcttttgtattgcttagtcaatatttttaacaaggatccaacctgaatatttaattggtgttttttccttgttgggttcgttccagttgatgtgataccaataggttccggtaagtattttcttgtcgaaatgtttaccgtcccatttgtaattgttgaatttatctcctgtaaaaattttatttccgtatcggtcgtagatcacgaagcttaaattttccttgtatgccagttcgctgtaatcgatgaagtcatttttattatccccattcggcgtgatggcgtttaacaaattcggaaccgttacctctacaaagatcggggtacagttgtaggcatctttcacatagaaaatatgctgtcctcttgaaagtcccgtaaatacattagaatcctgccagttggtaggcgaatccacggcgtatttataaggcgcttttcctcctgtcacttttacggttgccgtattgtttgaaatttcaatttccgaaatcacaggatctactgcttttttcacgcttacaaactgttttaccgaacatccgttgtctttaaggatgacccagtaatctcctaccggcactcctgataatacctgagtggttgctcccgtgctccacaggtaagactgatatcccggtcctgcgtcaagatttgttcttccgtcaatacagatgatcttatccacgagaaccgtagatcttttcggaggaatcaccactaagtttactttggcaattgcataacatccgttggaattgtacactctgatgtaaaccgaagcattccctgatacgtatgctaaaggatttaggatttcattggttccgttacttgcatcaacaaaagtcgggtagtattttttggtaatcggcgattctgtggaaacattggcaagcgaaagattaaaagctgcttttgtttcattattttcaagataacattcgctgatggtggcttcagttacaaccggagtcggaagataggctaaagtaattttagcgtttcctgtacatccttcattggttgttacttttacatagacaattcctgctgcggaaagataattcgcaggagttgtaatttcgttggttgctgcattcaggtcagccagggtaggatagaatttcttgaccaccggtgaatatgtcgttacattggctgcggtaagatcaaagaacccttttccgttgtactgacatgctttgatggttgtgtccgttaaaataaacggaaccaccgtaagatttaaagttaccttttcacagtcaataaattcgggcgcatttccgcagaactggtaaacaatagtatcaggacctaaatatcccggattcggaatataggtaatctgtcctgcgccgtttactgttgccgttccgtttgtcggataggtaagaatggttaccgtacttgccaccggagtctgtgttgtagtgaacgagaaagcgggagtaatgactttcgttgcacaggcattaagagctgctgttgtatttcttacacaggcaaaaactttatagatgggagtggtaaccggcggacaggttcccatggttactttcacggtatagtttcctgctacggtaggcgtataaacgttttgtgttgccccggtgatcgggtttccgttcaggaaccactggtaggtttcatagctgtcgtcaacctcaagaataatccccgggacacattcgcctgtttttttcgcaataataggaatggaagagaatcctgcgaaatatcctccataacctgcggtgctgtaacctccgtttactccggctgttactgctttcgttgaggttactactacatttcctgtcgggttatcaatagcataggttacccagttggtgtttcctgttaaaggataaggtccctgagcagcggttggagtagttgccgctccgccgtcgatgctatacgtaacggcagcacctgcttcagttaagatgtttaactttaaagtaactccggaaacacccggcatttcgttgatctttccgatctcatcgatttttcttggaaggaagcagttcaaaggtggaatataattgtatcctccattgtatgagaatccctgaattcctataaactgatataaataaacatttttggaagttgaaatgaacatattaaaatgtccgcttccagcagtttgttctacgtagcttgtctcgttaattctataccattcgccttcattaattgtggcaacaggtgttgtggctccattaataaaaatctgggtattgtcttctgtggcaataacaattccaccttccatattcagggctggattggttgctttggtttttaccatggcaaaagtattccccagtctttccaccggaaccgactgatccataattaaatctgagccatcagaagtatttgttgcaaagtttccgttagcatttccattcgtaagggttacaggtttatctgaaactactttagcaccgatgaagccatttaaattagcagaggttaaatgatttccggctaaaatataagattgtcctttatttaaagtaaaggtttgggaatttcctccgggagtacctccgataaaaactaaacctgcagtattccatgatacggtaaccgatgtattgtcttcggtagccagaattcctgctgtaaaattattaccggaactgcttgctgtacttggagttgctgccacatagaatttttttcctattcctgccttacctttagaggtaatgatttctccatgcgccgtctgagcggatcttaaagtacagtaaaacggtttgtctcctttaagatataaaccttttgtacctactgtaaaggcatctgcggtagttgtcccattgatgagattagcggcaatagcatacgaaacgggtgctccttttgcaaccgaaaccgtctgaataaggttattgttattgtatattcttacgtcaaacggagttgttgaatccgtagaaagatatacagcattgttgtaccctgtaacagatgtataaaacggggcaatccagtgatcggtgtctctttgtgcaaaaagcgtattgatcgtacaaactattaatacgaaagacagtagaaatcttctcatatacaattaattatgatttctacaaatttaaaataatatttaataaatgttaacgaaaaataaaagaaagtttaaaaattattaacgattcttaattaataaccatccggagtatgaaaccggtaattttgtgtcaggttcattccattttaataaataccagtatgtgcctgttgataagggtcttccgttaatttttccgtcccaggtgtaatttttatcagatgatctgtatacgggagctccgtaacgatctacgacttcgattgaaacattttgtttaattcttaagtcggaataatccagtacgtcgttaagtccgtctccgttcggagtaatcgcattgataagatttaacactaaaaattctttaataaccggagagcatccgtctttacttaaaacataaacagtatgcattcctctggaaagacctgtaaaaatattagatgtctgatagtctattccgtttaatgaatattgatatggaggagttcctccggtaacggtaatggtagcattatatccggaaacttcaattttagaaataacgggagattcagcagttgtgatcttcacatactgtctgtacacgcatccgttaaatccaagatctacataataatttccctctcccgcaatgatagattgtgtagtggctccggtactccaggaataggaagtaaatcctgcacctgcatctaatgttgttgtatcgttaagacatactactttgtcggcaagtctggtagattttttcggtgtttttaaattgattgttaaaacgcctgtactcggacattctgtagcggaagtaaatctgatgtagaaggtacttatagcggaaatagtctggttcggtgaaatcgcattagttcccgcctgtgcattagccagcgtagagtagaatgtaagacttactcctgcattcgcagtaaaaagatttttataatcattcaaatttaccgcttcagagccgctgatatcactatcacaaacatctgttgcagcatttcctgtaattaaggtaattctgtttcctatggtaaagttaatctgaccaaagacagcaggacagcttccggtaagcgcgtctactctcacataaacagttgtgttggctgtataggtccagtttgcaggaagtgtattattattacctgcattggcatctgcctgaagtaaataatatcttacattgaaattggcagaattggttacaataacaggagtaatacttgagaaatttatattcacaatgccatcaaaattatcatcacaaagcgttgcattataattactcgtattgatgtttggagatggagtagtggttaaattgatttgtgctacttttgtacatccatacgatgatgttacgtttgcgtaaatcgttccggccggtcccgaataagttgccggtgctgcaattggagttcctgttaatgctgcattagtaaaatactgtaccgtagttcccgaatctggtgttacattagccgtagttaagttaaacgtcccgtttccgctggtatctgcacatgaagttaacgatgtatttgtagtctgtaaaacatctgtattgatgataattttaaaatattcaaaacttgcagggcttccgtttccttcaacataataaatgaaactgtccgttgtatctgctgtaagtcctatattgggtgtataggtaatttgtcctgttgcagaattaacggttgcagttccggaaatgggagctaaaataatgcttgtattacccggaacaatagcctgtgtagaatttgtaaatacaggtgtaattacttttgtattgcatgacccaatgttatacgttgttgttgtgattggaggacataatatatatgaataaggatctgtaagcagagaaccgcagttatttttagaaaccatacaggtgtagtttcctgcgccgtataattcaggattgatggaatatgaagtggctcccggaatagggtttccgttcagataccattgataattatcgtacgtattgtctacctgaagcaaaattccgagatagcaatctccggtttttgaaattacagggacagaggaaaaccctgcaaaataacctccgtaacctaccgctccgcttcctgctgcaattcctgcggttacagatttggtagaatttacggtaacaattcctgtaatattaggaacagtataggtaacccagttaggatttccgttcacagggtaaggtccgttagctgtagcaatcggatttccgtttaaagttacggttgctccggtctgggtgataatattgaggcgggtattaaaagtctgacttccgatttgattgataaatcctatttcgtctactttattgggcataaagcaactcaaaggcggaataaagttcatccctcctgtagcgtattcattgcctccggttgtagaagaaactcctgctaataactgataaacatagatgttattattggcagatatgctcatattgtaattgtctccagttccgtgctgtatataattattactcggaaccatataatactgtccttcattcagggtaattcctgtagcaataccgttaattgtaatctgggtattgttttgtgttgccacaatcagggctgtttccatttcggaaactacggttccgtttccttttaccacaacaaattcttttcccagtctgtctataggagctgcctgatccataaggatatcgttgttggtaaaatttaaattggtataaattccgttaaaatttccgttggttacagaaataggtttcgtagattgtattttcgccccgattaatccctcaagattcactgccgaatctgtacttaaagcatctacgatataggattctcctttatttaaggtaaatgtttttgtagggcttgaggagccatcagagaaaacaacattcggattatatcctgatatcacaaccgaagtattgtcttccgtagcagtaactcctatggtagagttgacataagttgcagcaccggtaataggtgccattcctacgtagaatgtttttcctaatccggctaaacctttagaggtaataatttctgcatgattaggaaccgaaaatctataattggcaaagaattttttcgttcctttcaggtaaactcccattgaattcggactaaataaatccgatggattagtagtaattaaaaaactgtttggaatacttacctgagcgggatttcctttactcacctgtactgtggtataaagagcattgctattataaatctgtacactaaaaggagtgttttcattggtggataaatataaatatcccttaagattccctgtaccagactttgaagccattggagcaaaccaatgatcagtatcaagctgcgcattgaataataaacaaagaaatgtacaaatggttagtaaaagttttttcatatttctcaataagggatgcaaatgtaagtattaaaagtcaattttttacataaaatttaattagtaatttctataattatgaatattgttgaatatttaatatttttttaataattgaaaatatattgtaatgttaataaaaaatcctgatgaattaaaatcatcaggattaatattttttggtgaataaaaaagttattctctgttttttatcaaaatccatccggagtaggaaaccggaagttttgtatcgggttcaatccattttaaaatataccagtaagttcccgttggaagaggtcgtcctcctgattttccgtcccaggtataacttttatctgtagattgataaacagcagctccatatctgtcagaaatttcaatagacacgttttgctttattttcagatcagaataattgagaacatcattgatgccgtctccgttcggagtaattgcattgataatatttacaattaaaaactccttaaccacaggtaaacaaccgtcttttcctaaaacataaacggtatgaattcctcttgaaagaccgataaatgtattggaagtctgatagtctattccgtttaacgagtactgataaggaggtgttccgcctgtaacatttactgttgcattagaagccgttacgttgatgctggtaattgtcggagcctgcgaagtcgttacattaacaaactgacggtaaacacagccgttaaaacctaaatctacataatacgttcccgcaccagcaagaatggtctgagtagttgctcccgtactccatgtatatgaactgaattccgcacccggatccaataccactttttctgtggaacaaaccactttgtcagtaagctgactggattttttaggcgatttaagcgttacattaataactcctgtattcggacattcagttccgctcacaaatcttacatagaacgtttttggcgaagtaatggtttggtttgcaggaattgtattgataccattctgagcatctgctaaagtggcatgaaaagttaaagtaatggcaggattagtggtaaataaatttttatagtcattaagatttgcattttcagaaccgttaagatcattatcgcaaaaatccatattcacgacgttggtaagcaacgtaattttatttccgattttaaaattaatctgtccgaaagccggaggacagcttcctcccgctgtatctactcttacataaacggttgtatttgctgtatacgtccagtttacaggcagagtgttgccatttccggcatttgcatctgcctgattcaaataatatcttaccgtaaaattcgcagcgttggtaacaatctgaggggttacggttgaaaaattcacgttaacgattccgtcaaaattatcatcacaaagactggcgttataattagccgtattgatatttggagaaggagtggttgttaaagtaatctgtgcctgtcttgaacatccattcgcagaagtgatattcgcataaataattcctgccggtcctgaataattcgcagggtttacaatctgtccggttaaattagaattggtaaaataagttaccgtcactcccggatcagaagaaacgttagctgtggttaagttataagttccgtttccgttgattcctgcgcacgaagataaagtggcatttgtaacgttaggcaaaggatttaccgttaaagtaatctgagctgcttttgaacaacctgtcgcagaagttacatttgcataaataattcctgaaggagctgaataggttgcaggattggtaatttgtcctgttagattagaattggtaaaataagttaccgtaattcccggatcagaagaaacgctggctgaagttaaattaaacgttccgtttccgttggttcctgcgcaagatgctaaagtcgcattattcgtattgggtaaagaatttaccgttaaggtgatctgagcagttttagaacatccgtttgcagaagtcacatttgcataaataattcctgaaggagctgaataggttgcaggattggtaatttgtcctgttagattagaattggtgaaatacgttaccgtaattcctggatcagaagaaacgttagctgaagttaaattgaaagttccgtttccgcctgttcctgtacatgaagccagagaaacattattaatattcggagaaggatttaaagctaaagtaatctgtgcggtttttgaacagcctgctgcggaagttacattcgcataaataattcctgaagctcccgaataattcgcaggattggtaatctgtcctgttaaattagaattggtaaaataagttactgtaactcccggatcagaagaaacgttggctgtggttaaattataagttccgtttccgttggttcctgcgcaggaagataaagtggtattcgtaacattaggcaaaggatttaccgttaaagtaatctgagctgcttttgaacagcctgctgcagaagttacattcgcataaataattcctgaagctcccgaataattcgcaggatttgtaatctgtccggttaaattagaattggtaaaataagttactgtaactcccggatcagaagaaacgctggctgaagttaaattaaacgttccgtttccgttggttccggcgcaagatgctaaagtcgcgttattcgtgttgggtaaagaatttaccgttaaagtgatttgagcggttttcgaacatccgtttgcagaagtcacgttcgcataaataattcctgaaggacctgaataggttgcagggttggtaatttgtccggttaaattagaattggtaaaataagttaccgtaattcccggatcagaagaaacgttggctgcggttaaattgaaagttccgtttccgcctgttcctgtacatgaagtcagagaagcattgttaacattcggagaagcatttaaagctaatgtaatctgagcggtttttgaacagccgtactgtgaagtcacattggcataaacagttcctgcctgtccggaatacgttgcaggattggtaatctgtccggttaaatttgaattggtaaaataggttaccgtcactcccggatcagaagaaacgttagctgtggttaaattataaattccgtttccgttggttcctgcacaggatgctaaagaaccgttgtttacctgtaaaacatttgtattaataatgattttaaaatattcaaaatcgaaaggatttccattcccctgaacataatatataaaattatcggtagtgttcgttgcagaaggattgggggtataagtaatttgtcctgttgttggatttaccgtagcagttcccgatgttggcgctgaaatgatactggtaagcgatggaacgattgtctgtgtagaattcgtaaacgcgggagtaatcacttttgtattacaagacccgatattgtaagttgtagtggaaatcggaggacataaagtatagctgtaaactcctgttaatctggtttcgcagttgttttttgtaattaaacaggtataatctccggctccgtataattccggattgatagaaaaagaagtggctcccgaaattggatttccgtttaaaaaccattggtaagtatcgtaattgttatcaacctgtaaaagaattcctgcgtagcagtcgccggtttttgtaatcgccggaacagatgaaaaccctgcaaaatacccgccgtaacctactgcaccgtttccggcagcaattcctgccgtaacaggaagagtggaatttaccgtgacatttccgttaactccctgaagagaatacgttacccaacccggatttcccgttacaggataaggtccgctgatcgcgccgatggcacttccgttaaacgttacattggctccggtctgggtgatgatattaagcttggtatcaaaagaattgcttcctattttattgataaagccgatttcgttaatttcttttggtaaaaaacagcttaaaggcgggatgaagttcattcctccggttgcgtataccgtacttcctgaagttcctgcaagaagctgataaacatagacattattattggcagaaatactcatgttgtaatgtccgttcccctgattgatatagctggttccctgaacaatgtaatattgtcctgcattcagtgtaacacttcctaaaaggtttccgtttacggtaagtttggtattattttccgtggcgatcaccaaagcagcttccattccggaattggcaggtccgtttccttttaccaaagcaaatgtttttcctaatctttccacaggaacagcctgatccatcagaatatctacattgctgttattttgggtggtataaatactgttgaaattaccgttggttaccgaaataggtttgttggcagtaatttttgcgcctactaatcctgttaaattgcttgaggacaaatcactctgcgcttcaataatatatgatttccctttattgatggtaaacgttcttgtgggcgatgaagtaccgtcggagaaaataacgttcggattgtagccggataatgttacggttgtattgtcttcagtcgcaataaatccaatggttgaattaacgtaaggttttgcggttgtattcggggcaacgcctacgaaaaagtttttcccgattcctgccaaacctttggaagtgatgatttctgcctgattgggaactgcaaatctgaagttggcaaagaattttttagaaccttttacctgtaatcccattgatctctgtgtaaaaagattggatggagtagaggcaatcatatagttacttggaactgtaacctgtaccggattgtttttactcacctgaacggtagaaaacaccgtattgttgttgtaaatctgaactgaaaacggagtcgtttcattggtggataaatacagatagcattccggagtaccctgaagagaacttgccgacattggcgcaaaccagtgttctgtatccagttgagcattaagaattaaataaaaaaaagagcaaaagattagtagaaattttttcatgtctaataataagggctgcaaatctaagcattaataatcaattttttatgatgatttttatccaaataactccatttgatgtaaattttaaatatttaataatgggttaatatttagacggttttgttatttttaagcacaaaaaatcccgatgaaaaaaatcaccgggatcaatatttttaatcttaaaaagattataagctgattctgataaatcctgttactttaagatctgcatttaccgacttcacatagtcagcaactgacatagagctgtctttaatgaaatcctggtgtaccaaagtgttgtctttgtagaatctctgcattttacctttaaggatattgtcgataatgtttgcaggtttaccttcttctacaagtttgtgtctttcgatttctaattctttatcgattgtttcctgagaaacagaagtttcatcaagagcgattgggttcatcgcagcagcctgcatagaaacagattttgcaacttcgtctgctccgtctacttttgcagaaagagaagtgatggcagcaattttatttccagcgtggatgtaagctcctaaataaggacctgtaattctttcgaatgcaccgatctcgattttttcaccgataacacctgtttgctcgattaatttttcagcaacagtgattccgtggaaatctgtagccaataattcttctttagaagcagcaaaaattgccatttcagccaattcataagctagctcgatgaaagcttcgtttttacctacgaagtcagtctcacagtttaaagagataatagcacctaacgtgttatcttcgtttactcttgcgattactgcaccttcagtagactctctgtcagctctgttagcagcaactttctgtcctttttttctaaggatatctaccgctttttcgaaatctccttcagcttcaactaaagcttttttgcagtccatcatacctgcacctgtttggtttctcaattttgctacgtctgcagcagctggtgtataagacataatatctattattttttttatttaagattagtattaatttttagcttaattttaaagcgatgcaaagataatgattttaatgataaactaaaaaatgactttttgcgttatttgtatatttaataaatttttaaatgtttacttaatgaaaaaaatatttctcctcatatttttatgcattttcactctcgggttttcgcaaaaaaagaaaaaaacgaaatccaaaggcatcgtagaaaaggaaactgccatcatctatacagaaagtgatgcggaaaccactgcggaagcaagagtgattgcaggatttttgaaacaaaatcccggacatgccaaaacagattatttcaaaagaaaactaattgccatcatcacggcaggaaattctcctgaagccaaaccaactattaagcccttaagtgaagataaaataaaacagatggttttggataacaacagcctgaataattctaaaaccattgcagccaatgcttccaaagcggaaagaaccgtaaactacgcgagtgttgccggatcggctaaaaaatctaccggagcaagcgaacagaataaaaagacagcagctatgttaacccatctttttaataacgatccgatggataaggaagcttacatcaatattaaaaacaggtctaaatgtaatcttatcgttaagatcaacggaaaaaaatattataatctggatgttccggcaaacggacagaattttttattggtagaaaaaggagaatatattttaaccacaatggtgtgtgatgccaaatattcgtccctgaaaaagatcaataaagatattgagatcgagctgaatctgagtgaataattgaatagagaaaagagctaaaaaaaccggttaagaagatttttcttaaccggtttaatttttttatcctttaaattgccccatcgcaatgaatttctcctgtctctgggtttcaagttcttttccagtgaattttgaaaaggctttgatgttctgcaatattgaatttttaaggttcagatacgttgtttccggatcgtaatgcgcgcctccaagaggttcttccacaattccgtcgatgaatttttctcttaaagcatctttcggagtcaggttcagtgcgtttgctgcatcttctttatgatcccagtttctccaaaggatggatgagcagctttctggtgcaattaccgtataccatgtgttttccaacatatataccttgtttcctacaccaattcccaaagctccgccactcgctccttcaccaataatgtaggtgaaaataggggttttaagcatcgtcatttcgaaaatgtttcttgcaattgcttctccctgtcctctttcttccgcttcaagaccaggataagctcccggtgtatctaccaaagtaattacaggaattctgaatttttctgcaagcttcatcagtcttaaagcttttctgtatccttcaggattcggcattccgaatcttctgtgctgtctttcttttgtagttcttcctttctgagttccgatgatcattactttctgaccgtccagggttgctaaaccaccgatcatggcaggatcatctgcgaaatttctgtctccgtgaagttctaagaaactgcctttatccaccattccgtggatatagtccagtgtgtaaggacgatccggatgacgggaaagttgtactctttgccaaggggtaagatttccatagatttcttttttcttttctatgattttatcctcgatctggctacatgctaattttacatcaacaccactttcttctcctactaaagaacaggtttggtattggtccattaattcttttataggaagttcgaaacttaaatattccattcttgaagtaaattaaatctttcaaatttatgaaaaattatcaaaatctatttaaaattattgatagcattgtttattctggagatagtctcctcttttccaagaagttccataatgtccggaacgtctggtcctttcagttctccaaccaacgataaacgtaaaggcatcatcactttacccattcccagacctttattttccgcgaaatcatgaaccgtctgcttaagattttcagcattaaaatcagctccttcaagatttgaagccaattcccctaaaattgccgaagtttcatcattccaggcttttttagatgctttttcatcataagaagtgggggcttcgaagaaaaactttccgttttcatagatatcttttgggaaagtagctctttccttcatcagcttaatcacttttaacagtttgtcgtctgacaatgttaaatttaaatctgaatttttaagaatattcagtaaatcttcatccgaagttttctggatgtactgatgattgaaccattctgctttttccttgctgaatcttgctccggctttatgaactttgttcagatcaaattcttttgccatgtcatccagagataaaatttctttatcgtctgcaggagaccatcccaaaagcgcaaccatattgatgaatgcttcaggcagatatccgctttctctgtatcctttggaaacatttcctgttgcaggatctgtaaaatttaaaggaaatacagggaacccgaatttatcgccatctcttttgcttaattttccttttccttcaggttttaaaatcagagaaagatgggcaaactgaggcgcttcccaacccattgcttcatataataaagtatgcagtcccagagaaggcagccattcttcaccacggataacgtgagaaatttccatttcgtggtcatcgatgatgttggcgaaatgataagtcggcattccatcgttttttaccagaactttatcgtctaaagtattggtattcacggacgaatttcctctgatgatgtctacaagatttaatgttctgtcgatcggcattttgaatctcacaacatacggcgttttttcatccagcaatttctggacttcctcttcagaaagtgcaatactgtttctcaaacggtttcttgatttattgtcataagaaaaaacgtctccttttgcctcatattctgcacggatcgcgtccagttcttcagcagtatcaaaagcgatataagcataatctgtttttaagatctgctctgtatatttatcgtaaatatgtcttctttcagattgtctgtacggagcgaattttcctccttttttcgggctttcatcggcaataattccgcaccattcaagggcttcttcaatgtattcttctgctccttcaacgtatcttgcggtgtctgtatcttcaattctcaatacaaattcacctccctggtttttagcaaaaagataatcgtataatgcggttcttacgcctcctaaatgtaaaggtcccgtaggacttggagcaaaacgtactcttactttgtccattttaaataaaaatttttgcaaatttacttaaactaatataaaaaggtacatttatttgcgataaagtaatttaattgcttatctttaattcatcagaatacttaattttaacgcaaagtccgcgaagttttcttttactactaacttttttaagttcgcaaaggcgtttcactcagcaaagaactcaaaagtttttcaatgatggcaatttcggataaccatatttaataatgtatttgaatgatttaattttcggataataaaaatcattcaaaataatttccttttcgaaaaataacagatataatgctgtatttttgtagagttttaaattcaccatggcacaagttaaaaaacagaataagttgtctttttatattcagggatttgcaagaggattatttcctgtaaaatctttcgaaaaaaagattgatgatctctataaaaccgtttccaaagaacagcttacaacagttgaaagaagagtagactactacaacaaaatttcatcggaaacccaagtaaatcattccggaactacaatcgcagatcttttgaagcctaaaactccgaaagcctactattttgatacttatgagtatgcaagatattttccaaaggatttaaagattgattttgcatttggtgatgtcaataccattctggattttcccaaaatcacgaaaagccgtcctattcacggaaataatgaaaacaatattttactgaatctggacaaagcaaggcatttcgtatctgtaaaagacagtctgaatttttctgaaaagaaaaatatcatgattggcagagcggcagttcatcaggaacaccgaaaaagattttatgaaaagtattttaataatccgctttgtgatctgggacaggttaataaaaacggaaacaaggagtggataaaacctaagatttctatcggggagcatttaaaaagtaaatttattttaagccttgaaggaaatgatgttgccacgaatttaaaatggatcatgtcttctaattctattgccgtttcgccgcctttaaagatggaaacatggtatatggaaggaactttaaaaccagatgtacattttatcgggattgatgagaattatgaaaatcttgaggaaaagcttcagtattacatcgatcatgaaaatgaagctctggaaataatcagaaatgccaaagaatacagagcgcagtttaatgataaaaatgttgaaaatttaatatcacttttggtattgaaaaaatattttgactacattcgctaaaaattattagacagatatgctagaaatcggagaaagaccttggggaaaatattatgttttagcggatgagccacattataagctgaaaagaatagaagtaaatccgggacagaaattatcttaccagtatcatcataaaagacaggaacagtggacaatcattgaaggtgatgctaccatcgttctggatgataaggagatcagtttatcttacggtgaaagtatttttatacctcttggtgccaaacacagaataatgaacctttcggataagccggttgtctttattgaagtacagacgggaacgtatttcggcgaggacgatattgtgaggcttgaggatgaatatgacaggaattaaaaataaaaaggttacagattgctgtagcctttttattttgtatttgttattttaaaatatataattgtttatttagttttagaaaaagcaactttaaagagttttccagcataaactgctttttagagtaacattttgttttccttttgaatctcgctagatannnnnnnnnnnnnnnnnnnnnnnnnnnnnnnnnnnnnnnnnnnnnnnnnnnnnnnnnnnnnnnnnnnnnnnnnnnnnnnnnnnnnnnnnnnnnnnnnnnntatgtattcataattgtcttgatttaattttgttatttgtttgtttaatttttatgcttcctgcagtttgtgtgagaaacgaagaacaataaattctgccggacgaactgccgccataccgatctccacgatcattctgccttcaaggatatcctgtgcagacatggttttgtttaagccaacgcttacataataagcttcttccggcttgcttcctgccaatgcaccgtcctgccactgctggttcaggaagttttcgatcatggtctgtacgcgaacccatgtattggctgtgttcggttcaaatacgaaacgttccgttgcttttttcacggattcttctaccatgttgaagaatctgcgtactgaaatgtatctccattcgttgctgttgccgtcaagcgttcttgcgccccaaaccaatgtgccttttcctgtaaaagatctgataacgttgatggattttcctgaagtaggatctacattaagagtcatctgatcttcgtgagaaacttttactgtaggagccactacatagctaagtccaacattagcaggtgctttgaatactccggaagtgctgtctacttttgcatacacacccgcaactgctgaggacggagccatcactactctttcagactcgattgctgctttagctttattatacagctctgttcggttggattttagccattttaaattgtctacatagtcatttggaagagacaaaacatttcctgagatacctttttcttcaaaacttgtaattttaacatcttcatcctcaaagctatgcgttaaaacagtttccaatttcggataataagcagctccgtattttaaacctgtagaaactactttatttctgaaagtaagatcatctccaagaacgtccataataacaaacctgtctttcatttcctctgcatgatccaaagccaatccatacaaaccgtaagcctctaatgctggtaaagattctgcatccgggaaaacgataagcgtaggctcatcttctttttcaagagtcttaagtcctgtttctaattcgctttttaatacttctgtaggatatcctgaagctactccaacagaaacaatataacatggaccaccaccgtttgcaaaatacatttgcatagcatggtacattttgaatttacctaatttagtggtatcaaaagtggtagagacagtattgtctttaacagaaattttgatctctttaccttcgttttttcctttaccaaaaacagcctcatattctaatagagaagaaattcttgtcggctcattttttggtcctttttctgtatatccgatgaaagcagggatcgctgtttctacttgtgctacggaaggcggaaattttgccagttcctccacgtaaacacctggtgttttgtaattcattttgttaaaaatttaaaattaatatttagttatgttcaatagttaaaccttcgtgcgcaatttccaaagtttcgattgccacttcattaccttcagctttcagatcggttgactgtaatttcaatgggaaggcatttttcactttccatgttacggcaggtgcgccgttttcgtctaaaagagaaatcgtgatcgatcttctttctaccgtattcatctgaaccgtctgcagccattcgaaataatcgttatcgcctttgaaagtacctctttttaaagtgatgtttccgaattttgccattccaggcattttgatcttgctgaaatccggacttgctccctgtctgtattcaatgatatcgcgttcgatgcttaatcccgaaacttcctgaaaaccgatatttgttccgccccagtctacttcaaaggaaaactttactaatggatatgtattcataattgtcttgatttaattttgttatttgtttgtttaatttttatgcttcctgcagtttgtgtgagaaacgaagaacaataaattctgccggacgaactgccgccataccgatctctacgatcattctgccttcaagaatatcctgtgcagacatggttttgtttaagccaacgcttacataataagcttcttccggcttgcttcctgccaatgctccgtcctgccactgctggttcaggaagttttcgatcatggtctgtacgcgaacccatgtattggctgtgttcggttcaaatacgaaacgttctgttgcttttttcacggattcttctaccatgttgaagaatctgcgtactgaaatgtatctccattcattgctgttgccgtcaagtgttctcgcgccccaaaccaatgtgccttttcctgtaaaagatctgataacgttgatggattttcctgaagctggatctacgttaagttcatcctgacgtttattggaaattttaataacgggagaatcaacataattaagtcctgtatttgcaggtgctttgaatactccggatgtactgtctactttagcgtaaacacctgccattgctgaagatggagctaaaactacttttttggattcaattgctgctttagcctgattgtacagttcagaattttttaattttaattctgctaaggttgttgcaccggaagcacccatcaccgcaactttatcttctttaaaagtgtacgttaaaattgttttaaggttcggataataagctgcgccgtattttagtcctgtagaagttaccttatctctgaaaatggcatcatctcctaaaatatccataataacaaacctgtctttcatagattctgcctgatctaaagcactgtcatacagagaataaacagttttaatagtttgtccatcattcgcatttgtaacagacgttacattggcatcagctgcaaggctaatatcagatgctgtttccgcatcagaattagcatcaattaatgcctgagccgcagccgcagccgctaattgagcttttacaacagccgcagcaagatcctcatcattaggtgcagcggcagcagcttgttgagcctgagtaagcgctgtgtcagctgcagtttttgccgctgtagctgcattaatagcaagtaaagcagcatcagcagcctcttcggcagcatcagcaaaggcttgagcagttgctacttcatcatccgttgctaccaaaccttgaagatcaggaaaaacaataagtgtaggctcgtcttcttttttcagtaaattaagagctgcttctaatttagcaggacttactttattttcttttattacgccgttttctttgtattcaaatttgtctaccgaaacaatatagcacggtccgcctccattggcaaaatacatttgcatcgcgtaatacattttgaaatcgcttacctttggctgaactgctgttgcagcaccatctttgaaagctacagcaaaagtttcggcatatgcttttccaaaaagttctttaaattccagcatggacgagattctggtgggtttgttttgtgtccctccttctgtataaccgataaaagcgggaatagctgtttcaacttgcgctacggaaggcggaaattttgcctcttcctccacatagactccaggggttttgtaattcatttgttaaaaattttaagttaatattaattatcactcgaagctgaacttcaatattttgttgtgattgattttggtttttttatagtttgtgagaaaaatttaatacaataaactctgcaggacgtactaaggctacttcaatttttacatccatgatgtttgtccctccggattttacctcaactttgtaagcttctttgggagagtttcccgccaatgctccgtctatccattgctgattaagaaaattctcaatcattgcttttgcccttaaccatgtatgaatgacatgaggctgattgatatatttttcattaagtgctatgcttattgactgtttaagcatgttataataacggcgtacatggatgtatttccactcgttatctttttcatcttcctttttgtcttttccatccagcgttctggctccccaaactaaggttccttttcctgtaaagtttctgatagcgttgattgattttccttcatcatcaatgtttaaaccggattgttcttcgtcggaaattttttcagtcggagctgttacgtaatttaagcttacattggcgggcgctttccagactcctcttgtattgtctattcttccgtaaactcctgctattgcagatgatggaggcaaaactactttcagagatttcagtaattcttttatctgattgtataatgaagaatttgcggtcttcagagattctaatgttactccattggcaattccaacgggctgattctgcgtatcgaggtgagaaacaggagttattttttcatcaaaatgataatttagaaccgttttcagatgaggaaaataagctgccgcataacttgaggaatttactgtatttctgaaactctctaccgcagtaagatttcctatttttgtagtggaatttccgtagtaggtatctaatagggcaaacatatttttggattctcctgcagattcggctttagcaattgtggtattatataattcatgaaagtcatttggagaatttaatgatacggcatccgggaaaataagaagaagtggctcttttatattattgattaaatttaaccctgattccaaaagatatttttccacctgtgctgcattgtaatctcccacagaaacgatgtagcaagcaccgcctccattagcaaaatacatttgtaaggaataatacattaaaaattttacctttggttctaaaactgttattcctgcatcagtatcttttaatgtaatactttccatttttgcgctcccgaattttttctcaaaatccagaagagagctgatctttgatggcttataatcaggtgcgctagtatcattgtcttcagaaggctttcgttcggtatatcctatgaatacaggtacagcagtttctaccaatgcaatggagttgggaagttttggcagttcttcaatagagacaccgggtgtcgtcggatttggcatattcataaattttaaattaaagggttatttgttttctgatattatttaaccgtaatatccttaatatcaacatcattaataagctgaacatcagaagcatttttagctccaatcttaaccacacttactttatacattacggaaggaatgatctttccgcccaataaaccccagatgtaacttagctgctcaaagggaacggcgtacatttctgttctgaaagtaaaattgctttctccgataccggttgcaacgtattccaatacattttttgcacgaagaacctcaataacttttgaaatgtttattaaagcactgtcataatccgtcatattggctgtaaccattacgaaaagatttacatatgccgaaggactttccatttttgtaacattggatgtattttttacatatcttgagatgtttttcatggtagattcctcctgaacgttcagtaaggtaatcaccactttattatcaagtcccgctgctccgtcttcatgctttgcgatgtcgttaacaacaacatctgctaaaccggcagaatgcaactcattttttaaaactgttaatacttcttttatcataatttttgttctttagtattatggtgcaaacatacaatcagcccgacttaaaaaacgaatattttgagggctccatcctgtctttgcagtaaatgctttttttgaattttcttttaacctaaaaaataaaccaacataaagcaatgacaatcaaataattaacaaacactacatttaacaaaaatttatcctgatctaaggcttgtgaaataaacactgttaactgaagatgattttaaggaataaaaaatgattattttaagtataatgttgtgagatttctcttttgatttttttatccgctcaatatttttcaagtatcaatatctgaaaagatataattccgaaatctgatcagatttcatccttttctgaattaaaaaatttatcgtttttattatcagaacaaaagtttatgatctactgcaaagacagaacagcgaggtcttattattcgtcagacggtttttcttcctctaattttgaccccataatttaaactttaatcacaatgaatattaaaactctttttggcaagcgcaatgaaattattggcggccattttaatgaattaagatcaaaactgggtatggcaaatcaggacgaggaagttgttttttctgtaagagaagaaatctgtaacgcctgtcctttgaaaaacggaaacaactgcaatacccaaaaatggattcatcctcagactcttgaagtttcagatgctccgaaagacggcttcataagaggttgcggatgcagactgagtgcaaaacagagatccaaatacagcctctgtcctgcaggtttctggggtggagaatttgacaagaaataggcattttacggtaattccaccattgtataactcaaatttatttaatgtgaagcaagatcatatcattcagaaagtttttattgaaattacggtaaataataaagaaaaaggactgagtataaaagatgatatcaacagttttctgtcgatggatgtttttccgaaaatagaaaaatacctcagtacttttgaacacagattagaagaccacattttgcagatccctaaactggaattgaatctggatgtaaaaagcagcacattaaattctgatctgaaagataaaattgcccaagttttcgaagaagaattatctgaggttacaaaccctgttttaaattcagatgagtttacagcaaataattctgaagcttatctggtaacccatcaggaaaaaattcttcagagctttatttattttttggaaagaggaagtatgccatggtggaattctgataaaaaaagtctttctctgcttgagccaaaagtatttaatgctattattcaggctgaaaattttcaaagcagtattcttcctgttttttctaaaagaaatgtgcaggaaagaatccttcatcagctttctgacggacaaattgcacaattatgcaatgttattttaaaagataaagcattaaaaatcaatttagaatctgagattataccgttgatctcaaagcttgatcagactaacagaatcattgtatggagactgatcttaaatattttgtcgaggcatctgaaatctccgaacattcatattgaggattattttttagaagaaatactgaaatctgaggctttatcaaaagatttattttttgtgaaaaatcattttcataacctaaaaacagtattaaagatatttccgatcatcaaagaggctgaattgattgaaaaaattgaagatacattcatcaaaaacgatcaaaatacaaaaaagacaacgaaaaaaaatgaacaaaattttacggaaatcaatgatgtggtaatacagaatgacaagaattctgaacaaaaagctgaagaatttatttctgatgaaggacaatatgttcaaaatgccgggctgattctgattcatccgtttatgaaaactttttttgagcattgtgatcttctggacaagaaaactaatcagctttcagatccggaattgggtgcgcatctgcttcattatattgctaccggaaaaataaatgctcctgaatacgacatgatatttgagaaatttttgtgtaatattcctcttcatcaatcgatcaaccgacatattaagcttacacgtaaacacaaaactcaagttaaaaatctgatagaaagcgttcagcacaactggagcgctatgaaaacatcatccgcagaattgctccggaatgaattttttcaacgtcccggaaaattggttgtcatcgaccacgactgtactcttaccgtagaacgaaagacacaggatattttgctggaaagactttcgtggggaatcggtcttgtgaagcttccgtggaaagataagtttatgtttgtgaactggtaaagagttttaaaatcaaagtctgtcaaaacatacagactttgattttcctatttttagaataaatataacttaggataaattgtagttactttccgatacaaaacttagaaaaaatattccccaaaacctcatcgtttgtgacctcgcccgaaatttcaccgagatgttccagtgcgtttctcagttcgtaagctaaaagctctgtggaaatttggaaagtaattgcttcttttactttttgtacagcttccaaagatttctgtagtgcttcaaaatggcgctgattggtaatcacaacattgttttcagaagctttcaactgctctacgtaagaagataattcatttttaagatcctgaatattctgattttcaacagcagaaattttaataaaatcaaattcctgagatattgcatttctgaaaacatcttctactttttcatatgttgcaggagaaatctcatcaatctttgttgcacagacaatcagtttcagatcatctctttgcagagactggatcatttcaatatcttcggaaaaatcttctgttgcagcatcggctaaataaaccagtatattggcattttctaccttttctttggctttttttacaccaattgcttcaatttcatccatcgtttcacgcaatcctgccgtatcaattaatcggaaagcatgaccttttatatgaagaacctcttctatcgtatccctcgttgttccggcgatattgcttacaatcgctctttcttcctttaacaaagcattgagcaaagtcgattttccggcattcggttttccgatgatggcaactgcagtgccgtttttgatggcatttccgtattggaaactttcaataagggaatttaattttacttcgattttatttaaaagtccaaccaaagctgatcggtccgcaaattccacatcttcctctgcaaaatcaagttccagctcgattaatgaaacaaaattcagcaaatcggttctcaggaaagaaatttcgttggtaattcctcctttcaactgattaattgccacttttctcgaagcctcattttcagatgcaataacatcagcaatcgcttcagcctgagaaagatcaattcttccgttaatgaaagctcgaagcgtaaattcgccggcttttgccatccttgccccatttttaattagggtttcaagaatacgttttccaatgtgcggcgacccgtgaaaagcaatttccacagaattttccgtcgtaaaacttttcggagccagaaaaatagaaagcatcacttcatcaatcgcctcttctccatccataaaatatccgtaatgaatggtgtgagacttctgttttgccaaatttttccccggaaaagacttttgcacaacagctaaagcttcaactcccgaaactcttataattcctaaagcacctactccattggcagttgccaacgcacaaatggtatcgttattcatgctgcaaatttacggtttttaaccgcaaacaaaaatatcctttatctattgcaataatttaatgagttcaaatattttcagtaacataaaaatcaatctcaagactttcaaacattttattttggagctgtttccggctatccactcatactcctcacgccaaacaagccacagcttttgccattgcttccaatatttgttgcggggtaaccgtttctatccgggctaagaatgtcggaaattaattattggttttctaaattcatctttaaagcaacgtttatcttttcgaatttataaccaccccgtcaaaaatttcttcgaaattttcgccacccctccaaaggaggggaatttctatcaggcaaaacatagaaataaaaaaatcatctcaaggactgagatgattacctgctttgaatttactatatgaagatatgaatgatgtctttttgttgatacaaagatagatttaccgatggagtattttttcaggataaaccctaaaaacacctccgtaaaaatacggtaatgaaaaaaaaaccgtcctgcaaatacttacaggacggttttttaatctatttattttctttacaaaggacttaccagttcaaggaaccagtcttttacttctccttctaaatatggcgcaattttatcttcacacgttttgtgataagcattcagccagttgatttcttcctcagaaagaatttctttaacaatggtatctttaaagaacggacagaatgttaaagtctcgaattcgtagaaagtaccgtgaatggtggtttcagattcttttacagcgatcaggttttcatgacggattccatactcaccttccagataatatccgggttcgtttgagcagaccattcctaccaataattcctgcggattcatatcttttctgatgttttgcggaccttcgtgaacgttcataaagcttcctactccatgtccggttccgtggttgtaatctttcccttccatccaaagcggaagtcttgcgatcgcatccaactgaacccctcttgttcctttcgggaatttcaccatcgataaacggattaatccctgtaaaaccaatgttgaatttcttttgaattcttcagaaactgctcctaaagccaaagttcttgtaatatctgttgttccttccaaatactgacctccggaatctaccagaatacttgcatcattcgtaacgtctttgcttccttcgctttttgcagaataatgcatgatggctccgttgtctttataaccaacgatacttccaaagctttcgcctacgaaattttcgccttctgcacggaaacctctcagtttttcaccgatagaatattcgttcatggcttcttttcccgcgttgtgagtcagccagtaaaggaatttcaccattgcaacgccatctcttaccattacttttctgaaaccttcaagttcggtttcgtttttctgggctttcatcagatttcccggaaccggagctttgatgaattcattttcagatttcaacgcttcaaaaatcgactggttgctgtttggtgaaacgagaactttttcgtttttaaattctttcaggcaattatagaattcttcgtaaggcatcatttttacccatgcttcatccagttgtcttctggcttccacttcaagtttatcgagatctgtaaacaatttcgcatcatttttagtgatgacgatatagcctaaaaacacgggattgctttctacatcgcttcctcttaaattcagcgtccatgctacatcatccaagcttgaaatgatatgtaccgttgcctcaatgtcttccattttctggcgtattgccgcgattttgtctactacggattttcctgctctttctacaggatgcacatatattggatttttcgaaggtgttcctctgtctttccagatttctttcagtaaaggaaggtcttcaagggtaatattttttgcgtttaatttctgcgttaaaagctcccagttggcgtgagaagttgccagagcatttaccgctacttttccgttcgcaggaatttcggaaatgatccagtcgatataatgaggtgttccttccattccgtctttgaaaagatcgattcctgaaccagccagctcgatcggagcctgtgtaaaatatcttccgtctgtccagagtcccgctttatctttggtaactaccacaaaacctgcagaacccaaaaatcctgatagccatgctctctcctgccattcttccggaagatattcgctcatgtgaggatctgcggaatatactataaatgcatcaacattatttttctgcatttcttcacgaagcgcagctactttttcctttgaagtcattttatcttaattttttaaagaggggaagttacgaattttttgaattttgaagatgaaattattgttgtttttaaaccgtttctgcatgattgaacgtttttctgtgctttgttattcttgatttcctgaaatggcaaatgtttgtggaacgacagaaatcctagcccggattgcagcatttgtctgagctcgtttatagtttttggatttgcggcggctgagccgccgcaaatccaaaaactataaacagcgagtgcggaaagccggaaaaagcttcttaaaaataatctgttttatgatgaggaaagatcgggaattctgaattatatgtaagaaaacagcaatattcagataccacaagaatcaattgttgttaaaatttaacattttggaaaggttattgcttacttacaccatatggaaagtcagaattacaaaaatcacagaaaattttatccgccgcatcatttcatttatcttccattgcttttgggattggaaatatttggcatttataaaatctttaatgatgaaaccaacaaattgatctggattttattttccgctgttatttttcttcttttctatcttgcgattatgctaagacagcattatgcgctggttcttcagaaccgattggttcggttagaatttaaacagaggtattacgaacttttccagcagagatctgatgaggttgaaggtaagctgaattttgaccagattgcagcgttacgatttgcttatgatgatgaatttaaagagcttttgcataaagcattacatgaaaatatttcgggcgacgaaatcaagaaatcaataaaaagatggcgcgcagaccatcacagagtataaaataataaacaccaaagaataaattattatgaaaaaatggagcttatacagtatgatgatattttgtctgctgacattaacaagctgcgaagcagtagaaacgatctttaaagcaggaatgtggtggggaattatcgtagtagtcgccgtaatagctattattttatggctgttttcaaggggtaggaactcttaaccaaatcgtatggaaaattcagacttagaactcatctcacatctgaagccttcgaagatcgtaaaaattatgaaagatccggtagcatctgcaaaggcggtacatcttatatataccaccgatgcagaaacagccggaattacacggaagaaaaccggaaaaaaatattcttactacaaagacggcgaaaaaataagagacaaagaagaaatcacaagaattaacaagctggttattcctcctgcttgggaaaacgtctggatctgtgcgctggacaacggacatcttcaggcaaccggtttcgatgttaaaaaacgaaaacaatatcgttaccatccactttggagtgccctccgaaatcacacaaagttttacagaatgcttcagttcgggtatgctttaccggatatccgtcttcaggtagaaaaagatttagctttaagaaatttcgaaaaaagaaagattcttgcactgatcgtaagtttaatgcagagaaccaacataagaattggcaataatgcgtatgaaaaattgtatggttctttcggtttaacgactttaaaggagaaacacgttcaggttaaaggacagaaaataacttttcattttaaaggaaaaaaaggcgtaatgcatgatattgatctgaaaagcagaaggctttccagactgatacagaaatgcaaagacattcccggaagagaacttttccagtatattgatgatgaaggaaaccgccatactgtagattcgggaatggtgaatgattatattaaagaaatcagcggtgaagattttacggcgaaagatttcagaacgtggtcgggaaccgtaaatgctttaattgcttttaaggaaatcggctatgcagaaacccatacagaatacaagaaaaaagtgaaagaagcccttgaaatagttgcttcccatcttggaaatacaagtacggtatgcagaaaatattatgtccatcctttggttattaatctgtatgaaaacaataccataaaaaagtatcttgatgagcttgaacaaatagaggaaaatgatggtaaagcagatctcacacaggaagaaaaattagttttaaaaattttagaaaacgaaaagatgtagactatttatagatttttttatttaatttttttctatataaagttggagaactatactcatactctacatttggataaaatttttcaacctccaataactctctttctgcaacagaaatatttttaattaagtcatactttgtaattagtctttcgttttcaacttttaaattattctcaactaatacatttagctcccaggctctacctagaatactaatactatttaaaaagaaaaaaatttgttcatgatttgacatttgtgatctgaaaaattttgcaaaatcccatttttcagaatatttaaaatctttacctttatttaaataattaatcattgcaaataaatttcggtagtaatgtccaaaattattttgaactccttcataatatctatcaaatctttctaaacatggttcactaaaattttcaaattctagaaatattttattccagttttgtagataaatataatcatgagccatataagctggtttgtaggacaaataattaataacattattaacatattctgaatcatacttatttctaaatatagttttaatattttctctacccttttttccaaccccataaaaaaataaaacataacaaaattctaattttatccagttatttaagctagagcttttatttctagaaagtaaattttctttataatcttttgtgattttttcttcaaagctaattttattactattattaaatcgattcacatcttcaattaaagtattaaaatgtccatataatattggaaatgttgatttgtttgtaaaaattcttccggattgcttacttctaaaactaaatcttgaaatattttcattataaatatccattagtttaaaaatcctattttcaaacttatcttgtgtaaattgtttcttgatttcgtcattggcgaaaacttgcattagaaaagctaaaaaagtaaaaattgctgcaactaatccaattaaaggatttaatattccaccgatagaatcacctatttcattaggtttaagaattacgttttcattttgttcattactaaatttactatctggaatatgtaaaagaatatcgtttgtagaataataattgtaaatataaatcgaaaaataaattataattatgatgctgagagttgaaataaaatatttaaagaaaaaattattttttgtcatgaatttctattagtttatccaaatatagtacttaaactttaattataattttaaactatgaaaatgatacttgcttacctatgcttgaaatcgtaaatttgtatcattagcaaataaaaaatatacaactaatatgtctaaagcaatttcgcaagtaccatttgcagtaaacgagcccgtaaattcgtatgcaccgggaactccggaagtaaaaagtctgatcgcccagtacaaaaaaatgtgggcagaaaagatcgaaatcccaatgatcatcaatggtgaagaagtaaaaacaggagataaagttcagcttcagtcgcctcaggatcatgcgcacgatttcggattttatcacagaggaaccatgcagcatgtagatgatgcgataaatgctgcgctggctgcgaaaaaagaatggaacgagcttggatgggaacaccgtgctgccattttcttaaaagcggctgatcttttggcaggaccttacagagacgttattaatgcagcaacgatgatcggacagtctaaaaatgttcatcaggctgaaattgattccgcttgtgaattcatcgatttcttaagattcaacgtagaatttatgacggaaatgtattccgaacagccggtttctgacgcaggaatctggaacagagtggaatacagaccattggaaggattctgttttgcagtaactcctttcaactttactgcgatttcaggaaatttaccgacctgtatggcaatgcttggaaacgtagtggtttggaagccttctgataagcaggtttattccgcaaaagttatcatggatgttcttacggaagcaggtcttccaaaaggagttatcaacatgatcttcacggatggaaaagaaacggctgagaaagttttggcgcacagagattttgcaggacttcactttacaggttctacgaaagtgttccagggaatgtggaaaatgatcggagacaatattcataattacagaacgtatccaagaatcgttggagaaaccggagggaaagatttcgtaattgcgcatccttctgcaaacgtagaagcggtggcaactgctttggtaagaggtgctttcgaataccagggacagaaatgttctgcggcttccagagcatatattcctcagtctctttgggcagatgtgaaaaaagtaatggaaactcaaatcgcttccatcaaaatcggttctcctgaagatccgtctaactttgtaaatgcggtaattgacaaaaattcttttgaaaaatgtaaaggatatattgacagagcgaattcttcaactgaagcaaacgttgtaatcggtggtaaaacagatgattctaaaggatggtttgtacacccgactgttattgaaactacaaatcctcagtacgaaagtatggttgaggaaatcttcggaccaattttgtctatctacgtttatgaagatgcaaaatgggctgaaactttacagttggtagattcttcttctccttattcattaacaggatctgtttttgcacaggatcgttacgcggtaaatgaagcattcaaagcattggaaaatgcatccggaaacttctacatcaatgacaaaccgacaggagcagttgttggtcagcagcctttcggtggtggtagagcttcaggaacaaatgacaaagcaggttctaaaatgaacttactgagatggacttctgtaagatctatcaaagaaacttttgtatctcctaaagattataaatatccgtatttaggataatcattcaggaacaatagataattgttgttcttatatcaatacagccccggaatttcggtttcggggctttttatttgtttaaaccttgaactaaataatttattaacaaattttaattgattttattgatactttaatattcatatttctttatcggaacaattattgaactacaaataacctattcacaccaaaaaaataaaatattatgaaaaagttattgttaatggcaacagtcggaatattcgcagtaagttgcggtacaaaagaatcgtccatgtcgaccaccaattcggattctacagtggtagacaatacagcaactgtagcacctgccacaacagataccatgactacggcaaaagctaatccggacagtatgaaaatgaaaatggattctgcaagcactactgtaaaataacacagaattttaacttaaaaatttcaaaatcctcagaaaatattctggggatttttaatgctcagaagtttaaaaagaactttttactttttactttttactttttactttttactttttactttttactttttactttttactttttactttttactttttactttttaaatcattatatttgatatacactaaacattaaaaaatttactatgaagaaattatggatttttgccgtcttaggactggtatttttaggaagctgcgccgacaagaaagaaaacagagaagaatttaaagaagagcacaacaaagattctttaagaaacagaatgggagattctgccgtagcccattcagaaagtacttctactgcttcggacagtacaaaaactgtctcggattctacaaaaatgaaataaaaaaacaaaaccgcggaaaatctgcggttttgtacttaaaaaaacttgactgaaaaaaaccgggcaatcaccccgattgtattgttaggaagactattctcccagataaataaaagtattcactataagatacgcagatctgttatctatagatttccctaatcctcctgtagaaacagttgctgttcctgcaacagtatgcatatgcgctcctgcgggtgctgtattgtttagcattccgatgccgccccatgcggttgatcctccatccggatgataaccgccggaactgttgttcaccgtggttccacccaataaaaatccgccttctgtggaagaatgggtatgagatcctgcactttgcgccaccccgtttaccgatcccgaaagggtaatattgggaaggttagactgtaaaattccgaaatggttttcacctcctgtagcccctaaaacttctccgttggctctggatttcagaaccctgtctctggaatccggcagattgtccgtaaatcccagacttgctgctgctgcctgacttaccggcgaaagggctgtaatatttcttccgtccaaaagataccatcctccgtggtcggtcttttttacagaagttttaatatcgccgatgttcttgctgtttaatgatttttcatcaccaagcattaatttctgccagatcgtaccgtcaaaataatacaatccctgagcatctactctgttggtttttgaagtgattgaagtgaccggtgaagttacatatacaatagttccggcgtgtgtgcttgaatatttggaatctcccgcttttagctgatctcccgttaatctcgggggcaaaataccttccgctgtggagccatcgctgttcttggcgactacatccaaactcgttatgggatttgctgtattgatcccgatctgcgaaaatgcaaaattagatcctacagtagccataacgactgtaaaaattgttctcatccgtttaattcgttactagttaatgtttcatggtttggtgcaaaatatcggttacatattttacaacattggctagtggcattattagttttttagtgtttaggtgagtagtacggtttttatttttccggaaagattggtaataactgcagtagtaatggttatcccgtaaaactggcgcaaatataatgcactcaatagtttctgcgaaaagaaaggttatccgttttcaggaaaatgaaaagaaaataattaaatctgctgatcgttttcaggaaaaacaaaactcacattcgattgattttcagaataaagcaacttaatatagaccgatggagaataatctgtaatctgtttaaaaacggaggcaaacttgctgtgagaagaaaatccgcactcttcagcgaggatgctgatcttgtattggcggtatttttcgtcattaataagcttatcgacgatgtaatttatcctcagacgattgatataggttttaaaatccgaatttttatggcggttgatgaggtgcgaaagatattttgtattggtgtttaactctcctgcaagaaaggacagagacatatttttattcgtgaaggacgttcctttttcaaaatcattcaggagttcaagaagtttggcttcggtttcggaagtcatcggagattctgcttttttccttcctttttcatcgtcattattctgaatttcttcaatggaaatatgagcaaaatccggttttggattctcagaatagaaacctttatcctgaacaaatccctgccgatggtttctcaggatattccttattcttgcaagctgttttttctgtttggatctgaaatgaagaaataacccaattaacgcagaacacaacacaataatgattacgttctgtgcaacatgtatcgtttcatgatgctcatgtacggaaacgggaaatgcattgaccagtagtaatacaaaccggcagaaactattagacatacttcaacaaattattatccttgttataataattcatcattttcatgggtgtctttttgtttttcacaaaactaagaataatttattttttaataaaatttaatactaccaattaattcgataggtaaaatgaaaatttttactgtttttaataaaacatccgtttcttttttaacctgaaatcaaaaaaataatcaaaacatcattgtaactatttctctcctgaaaagacttatttattaacataattattacatttgcaaccaataaaaagtatttatgaaaaaactatcgatattttctgccttattcatcggagcgtttgctcttgcgcagggaataaaatttgaagaatccaactttacagccgttcttgctaaagcaaaaaaagaaaataaacttgtatttatcgacgcttataccacttggtgcggaccttgtaaactgatggcgaaaaatattttcccgcagaaaaccgtaggagattattacaactcccacttcatcaatgcaaaaattgatatggagaaaggcgaaggaattgaaattgccaaaaaatacaatgtaaaagccttccctacttaccttttcgtggacggaaacggagaactggtacacagaactttaggatatgtggaggaaaacgatttcatccagtttgcaaaagatgcaggagatccgggcaaaaggttaaccgcactgaagcaaaaatttgaagacggtgaaaaagatcctgagtttctgaaaaaccttgcttctcttacgatgtataacgatgctgagtttgcaggaagagtaatggagcgctatttcagtttaaaaaaagaactggacagagaagatgttcagatgttactttccgttgcacagaatccggacagcccgatgtacaagatttttcaggcaaaaaaggatgaaatctcaaagattattactcctgaaaagtatgaagcgattgacaaaaatatcaagatcagcagtatctttaaaaagtcttacaacccacagtcaaaaacgtgggatgacaattatttcctgacggaagctcagaaatttttatctaaagatgaggctgaaaaaattctgaaaaaagcgcaggcttcaagagctttaagagataaagactttgccaaatacgaaaaactgacgcttgaactgaaccaagatacttctgccttaagctccgaagaactgaattctcttgcatggaatttctttgaaaatgtaagcaacaaagcttctctggaaaaggcattagtctgggcgcaggaatctgtaaagaaagacgaaaacttcgcgaataccgatactttagccaatctttacaacaaagttggcgacaagaaaaacgccaaactctgggctgaaaaatccatcgaactggcaaaaaagacaggacaggattcttctgatactgaaaaactgctgaaaagcctgaatatacagtaaaaaataaaaaaggttgtctcccaaaacagacagcctttttttatggatgaaaattcaatccagatgattattatcttttctgtgtcttttttccacccactctttttgttctttggttaacgtttttcctgtagccataaaaaaagctcctgcaggatcattttgaaaatctgctctttttttagaaaacttctgataatctgtttcgatgatgtttctgataggagctattaactcactgatatttttaagtttaattaaagtaaaatgaaaatagtctttatcgtcataagcttcaattaccaatccgggtaatcctttaaaagtgtaaggaccctcagaaacaggaacttcttccgtataccatgcagtaatatttttatttcgatattttcctaccgcttttctgcatttataagtacttattattttagtatcatcttctaatttccaatcaattttttgatctgcttcaaaagaatatgttgcattaaaaatcttatcgtaaatctctaatttgttttcagatttaaatacttccggattaaaataagcttttggaattttagaaaaatcaataataattcttccgtttataggatttttgatactattcttcgttgattccttcgttaaagaatcataaattgccttttgatcgcttttgaaaatagaagatttcttacctatccacagactcgtcatttcttctttttgactgtttgcatctgttgtgtctattaaaaatttagtcaaataggtacatttaatatttgaattttccaattcctgagaatataaaatattccctaaaaatatcagaactaaaaataataatctcatcatgttttaaaaatttaataaagtctcagtataaaactgactgagactttttattttacaaattattgtttacccacaaaagaactttgttgtcaatgtcccatttgtggtcatacaattccatgcatcatcccatgttgaaacacacgttcctgaaccgtagcaaacctgatcatcaagaaacatatctaaacagggaatatacattgagtattctatacaattatattgtaatgttttagattctgctttagaagattcattcgtgtttttttcctgaataacttcttttttctctttttctgtttctttagcaggttttgtttcttctgcgttttttgcatttaccaagccggcaactccaaaggctgccaataaaataatttttttcatttgtttttagaatttgaaattaataataatttttacatgaaaagtatttcgcgaaacttttttcaaaaataaaatctcattccctaatcatctattccaaacagaataaaatacaattccgtttggaataaattttttctcccaaaaacagtatatttacagttcaatttccataattatgaataacagtgttggctttaaaataaaaaaacttagagaacagaaagaaatgtctcaggaagatctggcttttcagcttgaagtttcccaaagctatctcagcaaaattgaaaatggaagcattgaaaaattagactttatttttatgcagaaagtggctgaattctttaaagtagaacctcagtattttttggaaggtgataccatcattaataataatgtagaaacaagcaataattcttctgtgggaaatgtaggagatacaaatattaataatgttgatttagatttattcaaaagcgtgatgcaaaatcagcagcagatcagccaacttatggaaatgcagaataaactgatcgaaaaaatgttgaaagaaaaataaggagaagcattctctacccgagaataccaaaacccaaacaagttcttactttctcggaacgagaaaattcagcctgaaagagaaacactacgtctcgctccgagaaagtgtaaacccaaacagtttggctccgtctcggatcgagaacacgcaaaaccgaaaagaatatttatttataaaagtttaaacaaactccacataaaacaaaatccgcagaacagtctgcggatttttatcgtaaaatgcttctgtgccattaatattcaaataaaacgcttccccaggtgaagccacttccgaaagcggaaagaagcaccaagtctcctctttttattttcccctgttcaatcgcttcacttaaagcaatcgggatggaagctgccgttgtatttccgtatttctggatgttgttgaagaccttttcgtccggaagtccaaacttctgctgaacaaactgggcaattcttaaattcgcctgatgcggaataaacatatctacatcgtcaattgtttttcctgctttatctaaagcttcctgcatggtttcagggaatctcgttactgcgttcttaaacacgaaatttccgttcatgatcgggtaaacttctttgttcgttacattttcaggttcttttctcatcctgtcgctccatccgtacttggaacccggaaactgggtgcacagttcatctgcaaatttcccttcggaatgcatattgaatgctaaaatatctcctgcgttttcatcttctgttgccgacagtacaatcgctcctgccccatctccgaaaataacggaaacccctcttccttcatccgaaaaatcgagcccgaaagaatgcacttccgcaccgaccaccaaaatatttttatacgttccggatttaatgaaggcatttgccacactcgttgcatatacaaaaccggaacactggtttctcacgtccaaagctccgatggtatcgcagccaagcatatcctgcagcagaacaccgcatcccgggaaatagtaatccggagaaagggttgcaaaaacaatataatctatatctttagccgttaaacccgcattcgcaatcgctttttcggaagctttgaaacctaaataagccgtcgtttcctgagaatcgtttctgtttttacggtgtcttctttcttttatccctgttctttccgtgatccattcgtcattggtggtcattaattttgctagatcatcattggtaacaacgttatctggaacataaaatccgattccttttattgtacttttaatcatatagttttttaattttgacaaagataaacttatttaagacatagtatttcaaaatattactatttttacggtatgccaattgacacgatttacagagattcccagtgcgaatgggtggatgtagaggctcccacagcggaagacctgaaatttttacacgaacggtacgaaatcaataatcttcttctggaagataccttagatcccaatcacttaccgaaatatgaagaggacggagaagtaaaattcttcctactgcgggaaagtaccgagctggaacgcaaaaacctcaacacgattagcgacatcagtaccaaaatcgggattttcattctgggaagaaccatcatcacgatccataggatgaaaacgaagagcatcgcagaaaccaaaaaacagctttctgccatgaaaaccgaaaccacctccaaaaatattgcgttgaaaatcgcactgctcatcatgaaaagttttgatgatgaatcggtaagtcttctggaaacgatggacaatatcgaaaacgaaattttccttaaaaataccaatcatacgaaccagattaaaaggttatacaagctgaaaagaaaatcggggctgaattcaagagtgcttacgatttccacagatgccatcgataaatttaaattactcgggcttcaggattctgaagcgtatgatttaaaagacaaacacaaggacgttgttgccgatttcgatcatcttaacgcacagatcaccaaccttatcgggatgtttctcgccctttctgaccagaaagccaatcaggtgatgaaagttctggcgatttactcagtgtattttttacccatcacctttattgcaggagtctacggaatgaatttcgacaatatgccggaactgcactataagtatggctatcatgctgttttaggagtcatggctctggttgtgatctgtactttcatctacgcgcgaagaaaacaatggtaattttcccgctttaattatcgtgaaaatactgtggctgaatattttaaatatcactaattttaaatcgaaaaagaagaacggttaagttttaatacgctaattcttttccaaaagttttttagcatttaacattagatttcttcttccgtaggaatgacagtgaaaagaggaatattgtatttcccgcgttcgcgtgagggatacggaaggtccgactgaaaggaggagtttcagcgcggcgcttcgcgccgcgctgaaaccggaacgaagtgaagcctgcagaagcccgacccgaagtgatgatgcgggaaaccttataggttttaaaaacctataaggtttggatagggaaaacggagggatacgcccaaataaaaaataaaaacaaccaaaaacaaaagccatgaaacctgaaatgctgcaaaaaattcttgaggaagatgttctttccaaagaatccaaagaaaaactttccgcgcttcacgaccgtatttcggcgaaggaattttctgatcttctggatgcggaaggcaatcagtatgtggaatttgtgcaggaaggaggcggagtctggggaagcgcactggtgggttatctgtacggactggaaattttcgggatccgttttctgaaagtagcaggaacgagtgcaggagcgattaatacgatgctgatcgccgcgtgtaaaaccaaagaagaagccaaaagtgaagtgattaaagatatactcttcaactggaagttctccgactttatggatggaaaaccgtatgtaaagacaaccatccattcgatgctgaataacaaaaacttcctgaagatcaattctattatcgcaggaattattatgctgattctcgtaattgcaccttttgccatttcttcggaaacaacgctgagagccaaactgctttttctggttcccatcattccgatcattattgcttatctgtatctgaaaaagttatataatgatctgaaaaaagccaattcaggattaaatcccggaaatacttttctgaatcagatgaaagatgttctcgatgctttcgacattaaaacagtggctgcgctgaatgataaatttgtaaaaaaaggcagagacctcaacctgaattaccgtcatggcaacgaaacacaatattacaatattgccttagaaagcattgaagaaattcatcagaacaataaggaacatatcgatgaaatccggtttaaaatattttacgacggagttgttaacaacgaatattataaaaaagatcctttctattccttaaaatcggaatatattgtgattacaacggatattaacgccaaaataaaagtggaacttcccacaatggcaaatctgtactggtcggaagaagagcttaagaagatcagtccggctgaatttgtgagagcttcgatgtcggttcccttcttttttgagccttttcagaagcaaatcgataaaaatgatgattccgtaaaatatgcatggagattctggatgaataccaaacaggaagacattaatcctgccggagtttttattgacggcggaagtatttccaattttccgattgatcttttccactccactgatattttttatccgagaatgcctttattcggcgtacagttaacgagcgattctgatattcagtctgaaaaaggaaaaaccagcgcagaaattttaaaatcgcctctctcttttgcaggtaatattattgatactttaaaaggttttaacgacaaaacttttctcaccaaacatacgttttatcatcttttcagcattcagaccgtgaactgcggaaccagcaactggctgaatttctttatgcaaagagaagaaaaggaagagctcttcaaccgcggattttctgcagctctggatttcctgagtaatttcgactggcaaaaatacaaatgcgagagaatgatggtttccatgaaggagaaaaagatcctgaaggaagaggatacgaaaacggtggggtaacaagtaaggatgttttaaatttttattaaccacaaaagtcgtaaaagcttaaaataattttaatttagtgcatgaatgcaatgaaaagctcacaatagcttaaaaagcttcgattttcttcttaattgattttttattttaaagtaataaaaactaatgtgactgaaattaaatcatttccgccacaatctccccgattttcggagccagcgcaacacccattcctgaaagacggactgcacaaagctgtctttctgaaagttgttttacaatcggtgttttttcggttcccattgccataattcctgaccagcgatgagcgatttcaacatgctgatctggtaaaatcacttcttttaaaaagttttctaaatgactttgtaagaattctgtggtttcaaaagatgtggtttcttctgttttaaaatcctgatttcttccgcctcccaataaaattcggtttccgagatttctgaaatagtaaaagccttcatcataatgaaatgtcccttttaatttcagatgttcaatcggttctgttaaaataatctgtcctcgagccggaataatttcttccttgtctaaaaatcttgaagcaaaagcattcgtacagtgaattaactgatctgccttcacagaaagattttttgaaagatgaacttcaatttcatctgaatgttccgtgatattttcaacttctgttccgaaaagaaattcaacttttaattcgtgacacttttcaagtaacttctgaagcagtttgccggaatgaaggcttccttcacaaggattttcaatcagatattgagattttcccaaaccgaattcctgaattttatgccggcttaaaaaataggtttcttcaatattggtaatggatttcagcttttgattcacttcatccagcttttgtaaaggttcatcatcattaagaatctcgaaaccgccattcagatcaaaatctatctcgaaatttttaaaataatgctgaattttctgcaaaccgtcaaacctcatctttacaaggtctaatgttttttcccagcccattttttcagaatcggcaatcacttccgttaaacttccgaaacacgcaaatcctgcatttctcgtggaagcgcccatcggaacagaatttcggtcaatgatcaaaacagatttttcgggatatttttctttaatggaaattgcggtccaaagtcccgtaaaaccggctccaatgataataatttcccgttttctgtaaaaagtttcaagttcccagatgctgttcataagtaatttgtagtgaatggttaatgatgaatttgctttgcttgtgaatttttttaaactctataattgacttaagtttgatataaaacaatacaaaaaacttaagagaatgtagtccaaaatcatattttaaatttattatcacctttaatatattctaaggtcttaatgtattcaagagtattatgagttgctatcttgccagacaagacatcattaatactttctataatatgtgattctaaaatagctaaagctgtaataaatgattcttgtttatatctacatatgtaattaactgattcaatacgtaaagaatattttaataaattcactaaatcatcattattttgccagtgtttaaaaacgtttttctctatattttttataacaaatgacatattattcattataaaatttttaaatagataaattttttcccatacttcaacactaagaaatggtctttcatttcttagtgttttttctaactcttcatataattttaaaaaatcatccatttgataatcaatttctaaatcaatttctttactgagattttcaatataatctgaaaactctgaaatttcattttcatttataaaatttaatatataagagtatgtatgaggaattgccattttaaaatcatttaataatacccatattttttctatggcatcaattcttctttgttgactaacaccataattagatttttgaacgtccattaaatttgaaagcacattatttttatttgctaaatcagttttaattacttccaatttttcatctgtctttgcccgccatttattattttgtgcatcagctaatcgttgtgctaaaaaggcaacaattgcaggagctataacagtacctccaccgaagagtaacaatatctcatttgtcgtaatcatgtaataagttttttgcaatttacaaatattgaaatttaatttttttaattaaacacaaacttttgataataataaaaacagcatcaatcttttgatgctgtttaagttttgagattttgtttaattatttggtattaactagtatatcattatcttaatttttattaaactcaatttatggtaatttatttaaacacataagtcatataagatttaaaatcaactaaaaaattataagtaagaacacattagtttttgaaaatccttgattttccttgttgatctttttgttcaatatttaaagtaaaaactcatgtgacatatgtgtttaattggattgtttgtatgatatatttgcaattcacaaacaatgagaattcacctttctatccctgacttccttcttcttcgccgttatgatggaaaccgatgattcttctcggttcttcaactgctttataagtatccagttcttttttaagattctgaattctctgctggaactgatcgaaattattgatgatcgcatctgctaaaaatctcgcaatctgatccagatattcttccgtcagtttcgccgccgcatctcttaaagcgccttttaaaagtttctgatcgatctttaaattttcgttccgtgttttctgatattcgtttttaattctcttcttcagactttgggtaaaatcgatgagcatcgtattgctgaatactttcatttgtgaagaaacctcattccagaaaggaattttatcggctttgttgttttttaaaatcttaaacagcaaagaatccttttccagattttttgtcatcgcatataaaatgatttcagatctttctgcaagattaggcggaaaaacagggatcatcacatcaaatcttccgggagccagaatttcttcattgatgtcggaaaccgagtttgccgaacctaccatcagaagattttcctgctcaaatttcgaaatataatgcagaataagctcctgcgtttccagattacaggaagccacattattttcagcttttcgggacatcatgatgtcatcaaaatcatccagaaacatcagtattttttcttctttcattacagtcgcaagaaaatcactgaaattggtctgtgttccgtctacaaaggaagttccgaggtaatgttttttaacttctttaaattgatagccgataatttccgcaattttattcgcccagaaaatctttccgcttccgggaggtccgtaaagaataattccggcaggtttgttgattccccagtctttaatctgctgcggatttaaaaacggttccagagcgcctgaaatatagaagaaaagatctctgtagccgatgaaatctcttttttgaaggctggttttatgcccgaaataatcgtatacaaactgataatttccgcccagtttgttatcgattccgtagcttgaaatggaggatttgaagaaaccgttgtcaaaaatattcggatcggcttctttaatggctttttctattttttctttgggctgattgatggtttccgcaatctgttccaatgtttttgttttgtctaaatctttttcgtaaagttttaaaaattcgatgttttcgcgcgcaaacttttcaaaatcttcttttacttcaaaatttgtgcttatgcattctacgagctcaagatcaaaatcctgaataaactgtttgatcgcttctgctgaaacgttaagttcttttgccagttcaattaacttcataattccctattaattctatcaaatttaatgtttttagaaattaaattttacggattgatgatataatttgtaacaaaacgtgaattatatacactactactatgtaaaacaaattacatggaaaaaattttatcagtaaagaatctgactaaaaaattcaagagaatcgtggtaaacaatatctcctttgatgtggaaaaggggaatgtttacggacttttaggaccgaacggaagcggaaaatccaccactttcgggatgctgctttctacgattaacccgacaagcggagaatggtactggtttggaaaaaaaggaactgatccggatacgctgaaaaaaatcggggcgattatagaacagcctaatttttatccttatctgaatgcggagacgaatcttaaaattgttgccgaaattaaaggaacgccttattccagaattgatgaagtgctgaaaacggttaatcttctggaaagaaaaaaggatcctttccgaacgtattctctgggaatgaaacagcgtcttgcgattgcttcggcgatgctgaacaatccggaggttcttattctggatgagccgacaaacggtcttgatcctgaaggaattatccagatcagagatatcatcaataatattgcaaaacaaggcattacgattattattgcgagtcaccttctggatgaaattgaaaaaatatgcagtcatgtaattgttttgaaggagggaaattctatctactgcggaagggtggatgagatgaccgccaataatggttattttgaattgaaagcagacaacaatacattgcttttaaatgcactgaatgagctgcagtggtttactgcggtaaatccggaaggcgatattctgaaagcacagatccgtgacgacgcttctatttcggcttcggcgctgaaccagaaactggctgaaaaagggattttcttatctcatttaaccaagaaaaaactgtctcttgaatctcaattccttgaacttgtaaaaaacacaaaataatcatgctgaaattactaaaactagaatattacaaaaacctgaattacagaccattcaaggtttttacgatcttatattttacgattcttattgctttgcttttcgtcggactggtagattttgatgctttcggaggaaagattaatttgaaagagcagggaatttataattttccgggaatctggaatttcacaacatggattgtggctttgctgaagattttcttaggattaatcattgttttttcgatttcgcaggaattcagcaaccggatgtttaagcagaatacgattgacggtttaagcagaaaggaattcatcagctctaaattgttaacgataagtattttcactattatttccacggttattgtatttgcacttactttgtttttgggatatcagtattccgatacgacagattcagggaaagtttttgaagaggttttctttattggcaactactttgtgaagctgtttaccttcttctgttttctgatgtttctttcggttttgctgagaaaatcggtgtttgtttttctggcgttctttgttttatgggttgcagaaagtattttgtcgaccatagaagttttttcaaaagtaagaggaacacaggaagcggaacgattaaagattatgaaagacgatttcttcatcagtcatctttttcctctggaaagtatgtcgagccttattcccaatccgatgatgcgtttaaaagcagcgcaaatctttggcggaaaatatgaattccactatcctaccgaaagtttagttgcgtgtctggtttggtgtgcgatttttattttcgggtcgtattggattctcagaaagaaggactggtaatttatttgaaacattcaacacaatatattcagattatttttttaagtggttcgtttttacggatcacttttttgcttttttggcttaaaattttcattcagatgaaattaaattataaccatgagaaagatctattattttccgggactgatcagtgctttgctgattcctgttttgttttggtattacattcatccatatattgataaaacagtttacaatgtagttgacattggactccctgcgaaacttagaaaagacaattataatcagaatgctacctttgaaccactaagaaactggaattacaagaaaattgccgttccaccaaatgaagccaaaaataattcggatttttttgtttccgaaatcaaagcaatgcagaaaagaaatgagaaaaattccggaattgaatttattctttctgacaaaaatacttatgcagatctcatttccattttaaatgatatgcacatttcgaaaaatgatatgtatgctatagatacagagaaaaccggaaatatttttgcagttcattattatgttgaaccaactaaagaaaaagaatccgaatatcttttgtgcaatgacttaatttacgaagttgaagaacctacttttatggataagtttttagcctttaatcaacatttccaaacagtttttgaaaatgtatctgaacttccaaaaggagcttactatattttatttgcttttctattgtttctgaatatttccatgttaagcattaaagaacgatttcagctaaaacttcaatagattcttcaatgcgctccacttcgttctgctcctttctgaatgacagagtattaaatttaaagggtaaacataaaaaggctgcctttcggcagccccttcaatcacctcttcacttaacacttactttttatctttatcgagtagagaaatatattctccgtaacctttttcctgcatttccgctttcggaataaacttcagggaagctgaattgatgcagtaacgaagcccgcctttgtctgcgggaccgtcattgaaaacgtgtcccaaatgcgcatctccggttttacttctcacctccactctcgtcattccgtgagaacggtctaatttctcttcgattaattttttggtaatcggtttagaaaaacttggccatccacaaccggattcaaatttatcggtggagataaacaaaggttcacctgtggtaatatctacataaattccttcgcgggtttcatcccagtattcgttctggaaagctctttccgtaccgttttcctgtgtaacgttatattgttcggcagtcagtttttcttttaaaacctttttatcctgcttctgatatttattttctttggcttcctttgtttctttttttggcggattggcgtttcttgccatttcaaacaatcccggttcgatgtggcagtatcctcccggatttttatccagataatcctgatgataatcttccgctttatagaaattcttcaaaggaatggtttccaccacgactggtttgctgtaatttttagccagttttgccacttcagcttttacgatcgcttccgtttctttgtctgtggaataaattcccgttctgtattggtttcctctgtcatttccctgtttatcaatgcttgtcggatctatggttttaaaatataaatcgattaatagttttaaatctactacttcaggatcgtattttacttttacggtttcggcaaaacctgtggtgtggcttaccacttcctcatatgtaggattttttgtatttccgttggcatagccgacctctgttcctactactccgcgaacctgctgaaaaaagtgttcagttccccagaaacatcctcccgcaaaataaacttcttttacatttttgttgtccataatggtctcattttcttttttattttctgtggatttttgcttggcatctccacagcttgtcgcaaaaactgctattcccagtaccacactgagcagaattagtatgttcttcatttttattttattattcattttttcacatttaaaatcattaaaccaaatcctaaaagcatcagatcttttacgataaaaaaatctgttacaggaattccgtctaccattttccaaactccgggagttgtaaacaaatagctcaaagtagtaaggaaggtaacgatcattccgatggcggcgtactttctgagtgatgcaaatttcacactaaaaattaaaagtaatgcaatgataatttctatcactccgatagcattagacactgcctgaatgcttacaatatcatatacgaaaaaagtaagaaaatggttttctaccaaaggttttatcgcgttcgcttctgtgggtgtgaatttgaaaattccgatccagagcagaatgatggcagctccgaaaagtgagatgtaataccctgcttttccggcaaggtttctgttatcgattttaagtgtagttccgttcatttttttaagattttgagttaatactttgttattttcaaaagtatagtcggaacgttttcaaaatcctgacaaaaaatttcttaaatatctaattttttaatcattttatctttaaaatcctgaatttcagaatcctgaattttacttttttcttcattaaaaagttttctctttaaaatttcatctaaaatttccagcttttctttataagctctgcaccatttacagattttcagatgcatggaaagttttcgattctcttttgaagagatgttgcctgcgtttcttttttccatgagcatggttgcttcactgcatggtaaaaataggatatggattagtttttttaacattttaaaagcatttataattgagcaaaccagttaaattccagacattctctgagctgcattctgcctctctgcagaatcttccaaagattagtcgtagaaatattcagttcctgacttacttcgggtgcttttttttcttgaagataatacattttcatcggaagtttccaccgaacgggcaattcttctaggcaatcctccaatgttgtattaaattctgtatcatctaaaagttctgttcctttattttcagcattccagtcattcagcacatcgtcatttttccacgatccggtttcatcaaaaaaatgatccagtcttatctgtggttccgatttgtattttttgcggtaaaaatcggcaacctttctgtttagaatcgtcattaaccacgttaaaggctgacttttcccttcaaaagattcgtatgacgaaaaagcagagataaaaacctcctgaacaatatcttccgcctccactctatccgacaacagataaacagctcttctcagcaactgcccggaatactgatcgatccagttcttaatggtttcattttttgtcattgatttaaatttataaaaaaatcagcacatttttacagttaaaaacgaaaatagaaagttaaatggtaaactgcaaagttttcatcaaacttatctgaacgttgtatttgtcatgctgaaagcatctaagcaataatatcaaacacaaatgctacaaatcctaacaccaataacccgattctggtaaaattatatctcgtgttgtgcaatttacatgctttcatcatgacaaatgatggtttattatgataaatggtgaaaattatgaccgtaatttagccccgattgcaatgaaaatcccgcagtgaagcggcggagcgaagcggagccgcgcaatgaggaattgcaatggaaagcgggaaaaagctcctgaaaatgtttcagattattatacaaatcttagcaaaagtatcaaatatttaaaactaaatcactcaaaaacattaaatttgcatcttatcaaaattgtaaaaagcaaagcaatatatagtattatgacatcacaagagattcgtcaaaaatttttagattattttaaaagtaaagaacaccttatcgttccttcggctcctattgtgctgaaagacgatcctacccttatgttttccaactcgggaatgacgcagtttaaagattattttttaggttacaaagagcctaaagccccaagaattgccgatacccagaaatgtttaagagtttccggaaagcacaatgatctggatgatgtaggtagagatacctatcaccacaccatgtttgaaatgttggggaactggtcttttggtgattattttaaaaaagatgctattgcttttgcctgggaattgctgacagaagtgtacggaattcctaaagaaaatctttacgtaaccatttttgaaggagatgcttccgaaaatctggaaagagatcaggatgcttacgatttctggaaatcccatatttctgaagacagaatcatcaatggaaacaagaaggacaatttctgggaaatgggtgcaagcggaccttgcggaccgtgttctgaaattcacgttgatttaagaagtgaagaagaaaaagctaaagtttctggtcttgaattggtgaacaatgaccatcctcaagtagtggaagtctggaatctcgtttttatggaattcaacagaaaagctgatggttctttggaaaaacttcctgcacaacatgttgataccggaatgggcttcgaacgtctttgtatggcgcttcagggaaaatcctccaattatgacaccgatgtttttacccctttaattgctaaagtggaagaactttcaggaaaaaaatataccggaattttaaaagacgaaaaggatattgcgattcgtgttgtggtagaccatatcagagcagtttcttttgccattgcggacggacaattgccttcaagcggaggtgcaggttacgttatccgaagaattttaagaagaggggtttcctattcttacagattcttagacatgaaagaacctttcctttataaattggttgccgttcttcaggaacaaatgggtaaattcttccctgaacttgaaaaacagggagctttggttacagaagtgatcaaaagcgaagaagaatctttcttaagaaccattgaaaatggattgataagagttgaaaaattaattcagcagaccattgaaagcaatttgaaggtacttccaagcaatgaagttttcgaattgtatgacacttacggttttccggatgatttgacgagaattattgctgaagaaaaaggcttaacgattgatgaagcaggttttgaagcgagaaagaaagagcaacaggatcgttcaagaggcggtgctgaacaaaaagtccacgactgggtaattcttgaggaaaaaggagaaaattttgtaggctacgaccaattagaatctgaaacctacatcacaagataccgaaaaatagaaaataaagacggagaattttatcaggtggttctaagcgaaacgcctttctatcctgatggcggcggacaggttggagataaaggtcttcttgaaaacgccacggaaagttttgaggttctggaaaccaaaaaagaaaacggactgattatttcgttaattaacggtcttccgaaagatgcaggagctgttttctatgctaaagtaaatgctgcagaaagaaaaaattctcaggcaaaccactctgtaacgcacttactgcatgaagcgctaagagaagttctgggaacgcacgttgaacagaaaggttcttacgtaggtcccgattatctgcgtttcgacttctcccacttcaacaaaatgacggaagaagaactggctttggtagaaaataaagtgaatgcaaaaatcaaagaaagtattgcgttgcaggagttcagaagcatcccgattcaggaggctttagacaagggagcaatggctttgtttggcgaaaaatacggagacagtgtaagaatgatccagtttggaagctcgaaagaactttgtggaggaactcacgtaaaaaacaccagcgaaatcggtcattttaaaattctttccgaaagttctgccgcagcaggaatcagaaggattgaagcaatctccggagacgaatctgaaaaatatttcaaaaatcttgaaaaacaggttgctgaactttctcagttgttaaaatccaaagacctcatccgttcgattgaaaaactgatggaagaaaatgcttctttaaaatcggaagtggaagctttcaagaaagaaaaagcaaaaggagaaatcggcgactggaaaaatgcttacgaacaaaaaggagataagcagcttttggtaaagaaaacatctcttgatgcaggttctgtaaaagacatcgtattccagttgaagagagaaatcccgacttcagtaacgatcatcctttctgatgcagacggtaaaccaatgattacggtgggtgtttcagatgatctggctgcaaattatcaggcaggagctatcgtaaaagatttagcaaaggaaatccaaggcggcggcggcggaaatcctggttttgcaacagcaggaggaaaaaatcttgacggattggagaatgcctatcagaaagctttgaatatttagacaaacttaaaacgtcaataaagttattataagaaatcagttgtaccatctttgcgtacagctgattttatttttaacaaaagattatattttttcgtaccattttgtaaccttcttatttttagttttgtcttatctataaaaaagactaatgacaaaatatctatcatccctgttattgtttgtttccgtggtatttttcgcgcagaatcagctgaaagtgatcagtaaagcggacaaaaaacctgttcataacgcagcggtctactgtgatgacgcacttctcgggaaaaccgacttcaacggcagtgtatcttttaaaacaaaatgtaaaaagatcgaaattcttgccagcaattttcaggatgtggtggcggatgtaaaaccttctatggaagtttctatgcagcctttgtctgaaaagatgggaaatatagataaaatcgttattcaggataaaagtgatcctagagcgttgagaattttagatgaggtaaacaaaagagccaaagagaattcacccaaatcgctggattcctacaattttaaatcgtattccaagttttctattgatgtagataaagattctgtggatacgtacaaaaactttttggcagtaagaaaagactcactttccaaggttgataaaaaagaccttaagcaaacggataaagagaaaaaagattctttgatcggagaagatcttattcaggcgaccaccgaaagccagttgtttctttgggagaaagccgcagaatacaaatattctaaaagtttcggggaaaaaaccaatatcattgataacagaatgtcgggattcaaaaatccgatttatgaggctttagcgatcaatatttctaatcttgacagaacaccgagacagcttagacccgaaaacagaaaattattcaatttttatctttccgatactttacagctcgacggaagaaaaacttttgtgattaaattcaaggaaatcaccgataaaaagaagcaaaatccgagaaaattcaacgggaaaatctatattgattccgaaacttatgctttgaaaaaatttgaaagtcaaagcaaaaagcggaatgaaggagatattgtttcggtttggaagcctattaacggaaagtggttcttagactacgaaaacatcaaagtaaaaatgggaagccagagtttcgagacttctaaaaaagacagtctgaaacccggagaaaaaacgaaatacaacaaaaagaatttcggaaattatctatatgtaaaaaaccgtttcttcgattttgaaatcaataaagaacaaaaagcatccgaattcaaaggctactctcttgaaatgaaaaactcggacggaagtcttctttcccagtacagaaccgacagtcttaccgcgagagaaagtgcaacctacaccaagatcgacagttttgtggaaaagcatgattttgagaaaaagctgaatactttaacccagcttttaagaggaaatctgcggtataaattcatcgattttgatcttacaaagttcttcagttacgataaataccaaggtcttcgtctgggagcaggaattaagctgaatgaaaaattcaacaaaacattttctccggacggttatttcggttacggatttaaagaccatacctggaaatacggtttagggcttgatgtaagattatcagacaaaagaacgtctgttttcaggatcgattatttggatgatgtgttcgcagccggaagattcagcaacaatatgtgggacatgatgatgaaattttcagacatcaatctggatcttcacaactcaactttttacaaaaaccagaaatggggcgcttctttcctttatgatatttcgaattctttaagcgtgaaagttgctgtgaataaagaaaagcagcaggctctttttgattatcagtacaaaaatctggacagcagtttcgacaatacaagtgcaacgttatccttaaaattctcaccgaatgacaaaaatatcatgacgccaagcggaaaattcacttatgaaaaaggatatccgcaaatcttcatgaattacgaaaaaggatttgaaacgttaggcggagatctggattatcacagagtggatgcattaattattcataagttcagatcaaaactaggatatacgaacatcaaacttttcggaggaatttcttcaggaaacgcacccatctggaaaaactttgaaattgcgggacaaaccgatgcgaacagagacaaatggacttcgagcattacgacaccttccaatctgggattcgcaaccatgccttcgggaacatttttcaccgataaatttgcagccttcaagatatcacagtctcttcctttcaggtttaaaactttcggatcaagatattccagtatcgaactcgaatatcaggcggcgatcggaaacatgaaaaacagacaggatcatcagttccagtttcaggttctggatcattattatcaggaagccggagttatctggaaccgttttctgggaagaaactttggggtaggattttcttaccgtttaggatattatcagaccccggaatttaaagataattttgctcttaagttcagatttaatcttttaaactaagacctatttcaaaataattatctgcaaaatagaaacagaagctttcgggtttctgtttttttattatctttctgaaaaaataaccatgaaacatatgcttactgagtgtttctctgcaatattattttcttctaatacaaaaagaatcccgtcctttgattgaagatgggaagtttgagccttattttttaaaagatatttcgaatgaatgatcccattaatatcaattaacaaaacttttgcgggacaataaatattagtaattttggcaaggttttctatgaaaaggattttactgtttctatgtttttcaatctgtatttttggtttttcacaatcgaaagttacttctattgaaaccgttatcatcgaagacaaaagtgatccgagagcactggaaatccttaataaagtgaatcagtatttccatgagaactctcccaaaacgctggattcctactattataaatcttacgaaaaaatttctctcgatatcgacgaagacagcatttcgcagtacaacaaattcttcgaagaaaccggaatgttcaaaaaaaagcgggaaaaagattctttaaacaacattaccgcgcgaaaaatattctcgaaaagcaaactgtttctctgggaaagagcgcaggaatttctgtattctaaaaaatacggtgagaagatcaatattctggataacagaatttccggtctcaaacagcctatttatgaaatgatcgcgcttcagcagagcaacagagacaaaattccggatcagcttaaaaaagaaaaccgcggactttaccgcttctttctcaccgatacgattgaaatggacggaagaaaaaatttcgttatccgtttcagggaagtgaattacaaaaagcccgataaaaaacgaaaatacaacggcgctatttatgtagataccgaaacctacggcgtaaaaaaaattgaaaatttcagcaagaataaaaacgacggaattattaccagttcgtggatttttttcaacaacaaatggtttctggcatatgaaaccgtaaagctgaaaatgagtgatatgcagatggaaaatgaaaatgaagaaaaaaccgataggaaaagtaaaaaaactttcggaacctacgcttttctcacatcgcggtatttcgattatcattcccctgcggaaaataatcaaaatgactttaaaggttacactttttcagtaaaaaatatcgacggaaaaaccttagatcaataccgaaccgatcctcttaccgaaagagaaaaaaatacttataaaacaatcgacagtctcggaaaaatctataatatcgaccgtaaggcaagagttttgggcggtctgtttcttaacggacagattaaagtaggtgtcgttgattttgcagtggatgaaatcgtcaattacaatctttacgaaggtttcagagttggattaaaagcaaagcttaatgaaaatttcaatccgtatttttctccggattacctttttgcttacggttttaaggatgataaatggaaatacaggattggtcttgatatcaaaacaacgctggaaaaagactcgtatttccggctggattattatgatgatgtaacagcttccggtgaattctacagaagactctggagctttaaaatgagaacggcaaactatggaaataacctgaacaacgaccgttattaccgttacaaaggagcttctgtgtcttacctgaatgatgttaccaacggattaacactggtttttgctgcccgaagaaatctggaagaagcaatgtttgattattctttccgtggaagaggtccttcttttgataattttaataccctgtttacgttaaaatattcccccaattccacgaatattatgacgccacagggaaaatcactgatcgatcagaaatatcccgaactgtactttaattacgaacagagctacaaaatttttggcggagatttcaattatacccgatttgatgcgcttttaattcataactttaaaaccatgtttggaaccaccggcttcagactctacggcggaatggttttcggagatgcgccgatctggaaaaatttcaccatgaacgggcttgcttcttcaaggaaagattttaattttaacttaacatctttcttaggattcgccactctggaaggcggaaaatattacaatgaccggtttattgcgtattatttcacccataaaattccttggtattttaaaagttttgggcagaatatttcaagcttcgactttgtgttaagaggaacaacgggaaatatgaaacatccggattatcatcagttcagattccgtcctttgaatcatttatatcaggaagtcggtctggaatggaataatttcctatctacctactttaatctgggattattttacagagtcggatattacactactcctaattttaaacaaaattttgcaattcagtttaaattaaagattctggatttttaaaaaataaaacagctaaaaataaaagataaatgcagaaaatcgaaataaaagcagatcagtttttcgagttattaaaattaaaagatacctcgatgtgggaaatctttacccaaatgatcgatggaaacgaaaaggaaatcatctttctggataacgaaaataaaatccttttcaattatatccttccctctacaccggagaaaatggaggaagaccgaaaagaattttcaaaacagtttgcagataagcttgcgaatctgaattaaacttttagaaacgtatttcttcttatttaaagtttaaccttaacttaacgtgaattcggagaaaaacatgaggtgcttaatgtctaaaattaatattttagaattgaacaaatactaaaacacctcatgaaaaacaaagatatgctttttgacgaaaatctattgatagannnnnnnnnnnnnnnnnnnnnnnnnnnnnnnnnnnnnnnnnnnnnnnnnnnnnnnnnnnnnnnnnnnnnnnnnnnnnnnnnnnnnnnnnnnnnnnnnnnnatggagctaagggatatggttacagctgtattaatcatttttgcaggaggaaatccagacaaagtttttaaaacttaaaagaggtcggaatttcttccgaccatgactagcaaagccgccgcagccgaaactttgtaaatagcgagtgcggaaagctggaaacagcttcttaaaaaataaaggttcttcgactgcttcgcgctcaggatgacatcgctaatgctaactgttctaataacttggctttttttttaaataaaaaatgaccgattaaaaaccggtcaccctcaaattatttatctacctaacattgctttaagtatgattatctaacggagaaatattaaaaattattttaaaaagaaaaaaaatttttatcctgaaaatcctactgacaaactgttgtcatcaccccggtttatctttgtatcaacaataacaaacaacattaaaactatgacaactacagcaaccattacaaaacagtttatgacttcggaacaattattagaaaattggcagggtcacagaaatttaacgcgaagagtgatcgaagcgtttcctgaaaaggatttatttgaattttctgttgcgggaatgagaccgttcgcaaagttagcggttgagttaatcagcattggcggacctgctttgaagggaattgtcgataagaatatggaagcttacagtgaggaaggttttgcgcctaaaacgaaggaggaacttctgaaaaagtgggacgaagaaacggaaacgatcaatcattattttgcgcagatttcggaggagcgttttcaggagacttttaatttattcggacagtatgaatttcctgtgtatcagaacattctgtatttcgttgataatgaaattcatcaccgtggacaagggtatgtttatttaagagctttgggaattgaaccgccttttttttgggagagattttcggttcgttaatgcctttgttcaagctgaaatcattgattctctcacgaaaccgcagtaaggaaaaagagcggagatgcgtcttataaattaaattttgacgaacttttatgatctgcggatccgttcttctttaaacatgaagtttgtttaagctaattttaaatttaaccgcaaaagaagcaaaagactttatagaatttattaaggtatttctaaaggtttgcaaaaggaacctttgatttttgttaacttatgtgttctttttatattaatcattaaacttaaaataactaaagtgttcttttgaggtaaaaaataaaagtttaaataagtttatcatcttaaattattgccagaaacctcaacagcaattgttggggtttttattgatgtttgtctgcaatctttgacaacaaatcattgagttgtactttgagggtttcaggttctaaaatcgttgcataatctgcaaaagtaatcagccagcgcggaaatccgtctttaatagattctgtttcgaaagtgagttctaccattccgttttctgcctcaatttcttgggttaaaccataatattttttggaattgaccagaaaagtcatgatttttttctctaccaaaagtcttacgcgtgttttattgccgttgctgctttgtcggtaatcattaatctgcccgtattctcctaaaaacggattctgggtttttgaaatctttaaaatccggtcgacacgaaattgccggaagtcgtttctcaaggtacagtaagccatgatgtaccaataattgaattcaaagaaaacgccgactgcttcaatggtccttgtggaaatttcctcatcaacggttttatattgcatgattaactgccgtttttcggctatactttccagaatcataggaagaacgtctttaattgtatcttcggtttcggcatgatactgaaaaatatcaatctgattttcaatattctggattaaatttctgtcggaaaattttaaaacggaacgcactttttccatcgcggtctgataatgatttcccaaactctgatgcgaaaatttctgcatcagtttctcggcggtgatgaaactcagaacttcttctttggtaaacatgacaggcggcaatttgtagccatccattaaagaataaccgcttcctgcttcaccaatgatcggaattcctgcattttccagtgtttttacgtcgcggtaaatggttcttacactcacatcaaatttggcagccagatcctgcgctcttacaagcggtttcgattgtaattgggtgagaattgccgtgacgcggtcgagttttttgaggtaatggtcgttcattgggtatgaaggtcggagtgttttagggttttagggttttagggttttagagttttagagttttagagttttagagttttagagttttagagttttagagttttagagttttagcaaagttatcttttatcttttatcttttatcttttatcttttatcttttatcttttatcttttatcttttatcttttatcttttatcttttatcttttatcttttatcttttatcttttatcttttatcttttatcattataagtattaaccaatttatccagatttaaacttcttgcagaggcatcaaaaatttctctgtaggttccgttgatctgtaccagttcatcgtgagttccgctttctactactctgccttttttcatgacgtaaattttatccgaatctaaaatctgcgataaagaatgggaaatgataatcacggttctgccttcttttatggcatccagagaatttttgatctgttctgtggcgatggcatcaaggctcgccgttggttcatcaaggaaaataatcggtggattttttaagaataatctggcaatggcaattctctgctgctgtcctccggaaagttgcgtggcatcgtgattatatttttccggtaaatctaaaatctgttcgtggagataggcttttttcgcagcttcttcaatttcttcgaatgtcgcattcatatttccatagcggatattgtcttcgatacttccctgaaagatatggttcttctgaagtaccaatcccagatcgtttcttagaaaagtattgtcaaaatgattcagatctaccccatccaaaaatatttctcctgaatcgggaaggtaaaatttgcataaaagattaatgactgttgattttccggctccgcttaaacctactaaagctgttgtctttccgttttcaaatttcatggaaacatcgtgaagcgctttagttccgttcggatacgtaaagttgatatttttcagttcaaaatttcctttaatttctttttctacaaaattaccgttcggttctttttcgtcgtctgcatttaaaatatcaaaatacccttctgcatagatcatcgcgtcattcatgtcatcataaattctgtgcagttgtctaatcggagccgaaacattattgaaaagcatgatgtgaagcatgatcgctccgatggtcatctgctgatctaaaactaggtaaaccgtcagaaggattatcaaaaccactccgaactgttcaataaacgtttttaaaccatcataaataaagtttgtttttctcgtaaacatctggctttccatcaactgcatctgcaagtcgtactgtttttttccttcgaatttttcgcggacaaaacttttaatcaccataatggaattaattagatttaaaagtcctgaagttttctgttcacgctggtttcgcagagttcttctcactccgcttaacttcttcgcctgtaatgagcttacataaaaatagatgggaacaatgatggtggaaacaattcccacatatacattttgcagatacatgatgattaaagcaataatcgcgttggaaaacaaaggcagcatatctataaaaaagttctgcaccagtcgtgttaaactttcaattcctctgtctattctgatctgtagttttccggattcgtggttttcatcattaaaataggcaactctgtacgttaaaattttatcgatggcagattgcgcgagaatagaacttacattaattctaatcttttcgccatagaatttctgtccgaaattgatgaagatgttcagcagttcttttcccaataatataacggagatgataacgagaatatgaattccttccgacatcggatgcggaagatgcgtaagtttggttacctcatccactgtgtattttaaaaccaaaggattgacctgtgccgccaaagctcctaaaaaagtaagaaaaagtgttccgtagatcatcaaacgatacggtctgatgaaaggaacaagctgtttatagattccgaataaggtgacagttctgttgaaaggttttgccatacgatgattttaaataaaaaacgtaccgttttacagagaaaaaggtacgttttattctatttttcagcaaatatttgccttaatttaattttcgaatacgtaagtcgtgagataatgtagctcaggtttactcgctgcttttgagtctgcttctgcctgttccagagaataattggaattgatttccttcttctgaaacacaaaagaattattggcatttttatccaccacctcattaaaaatatgctgaatttcggaatttcccaatgaggcaaaactgatatcttcaaagccatacagcaatctgagatcatcaaactgcgcaaaattttcgtccacaaaattctgaaactgggttttagaatcgaaatttccagcccagatattatacccgtaacttttcttttgcggtttgtcgaaaatgctttggtaaacgaagttttctcctaaataagcttctcttacctgcggatcgtttgccagttcttccggaagtccttctttcagaattcttccttcaaacataatgtatgttttgttggtaatagccaaagtctgctgaacgttgtggtcggtaatcaggattccgatatttttatccgtaagacttcttacgattttctggatatcttctaccgcaatcgggtctactccggcgaaaggttcatccagaagaataaaactcggatccgttgcaagacatcttgcgatctctgttctacgtctttcccctcctgacaaaaggtctccacggtttttacggacgtgctgtaaggaaaattcttcaatcagctcatcgcatttcatctgctgttcgcgttttgaaagcttggtcaactgtaaaacgcccatgatattgtcttctaccgaaagtttacggaaaacagatgcttcctgagccaaataaccgatacctttctgagctctgcgatacatggcatcggtcgtgatttcctgtttgtcgaggaaaatttttccggaagtaggcttaaccaaaccgacaatcatataaaacgaggtggtttttcctgctccgttcggaccaagcaaacccacaatttctccctgctgaacctgtacagaaacgccttttactacttttttaggaccgtattctttgattaagttttctccgcgtaaaatcataagggcaaagataaagtttttttgaattcaaattttagataaaaaaaaatggacttggaagttttgtgaaattttaatacttagtttaaagattcttcgaataatatttaactcaaaatttttaaaaactttattttatttccataattttagactttcatcaacacttattattactatggaaaataatcaacagcttaccgagcttttagctttagatcttggtgtaaacatcatcaaccgaagaccttatgcgaaagaagttttcaaatggcaggatatggatcttcttccgcattcttccacggatactttgctttgcgaaatctacgaatggaacggaagaaactggagaaccacgaataataatcttataggctatttatttggcagcgaccagttaagtacggttaaaaatcaattgatgaatgttcagaaatttccggctctgattcctgattttgaatttacgaaagacagcatgattgaattcgggcttgctctcccctctcttttcaatatcggaattaaaggcgacattaaaagcgccaaagatttttctgtaaaagtaaacggcgttacaaaatccagaatcaccaacatagattctcccggaatagaaatccttcgaaaatattctgaatttacgcaaaacgaatccagatcatacagaaagaacatcaaatttaattatctgagtacttctttattttatgcagaaagtgtggaaattaatcttgaaaaagacgcaggcgtgaatcttgatgtgagtttccagacacaggatgtggaagtaaaagccaatgttgatacagatacaaaaaagaatttcgttctgaaatatacgggaaaccaagctccatttgctgcaaaatttacgaaaggaaaagattttaatatttcctgatattcttataatcgggttttagccaaagcttacaatcatcaatcattttctttggtttcaaaataagttttggctaaagcctaatttggagttcatcaaaaaaaaacgggctaaagcccgtttctattgataaaaacatttcgatccgaaatgttttttatttaaagtataatttgaaaaaattatctgttcaaaatcattgcagcttctttcgcgaaatacgtgaaaatcatatcagcaccggctcttttgaagcaggttaagctttcgataatggttttgtcattatccagccatccgttttgtgcagccgcttttaccattgcatattctccactcacgttgtaaaccgcaatcggaagatcaatcgcttcacgtactttagaaacaatatccagatacggaagtcccggtttaatcatgataatgtcggctccttcttcaatatctttaaaaacttcgtttaacgcttctctggaattgtgaaaatccatctgatatgtttttttatccttcggaatttccatattatctttcggcgcgctgtccaatgcacttctgaaaggtccgtagaacgaacttgcatattttgcggcatagcttaaaatacccacatccgtaaatccgctgtcttccaacgcttcgcgaatgacctgaaccctgccatccatcatgtcacttggtgccacaatgtctgctccggcttctgcgtgtgacaccgacattcttgccaaagcatcgtttgtagcatcattcacaatttttccgttttcgataattccgtcgtgaccgtaaatagaatacggatctaaagcaacatcgggcattaccaccatttcgggaagcgcatcttttatagctctgatcgtgttctgcatcagtccgtttttattccatgcttcttttccggtattgtctttcaggtcttctgaaaccttcatgtaaagattaaccgcttttatacctaaagaaaataattccttacattctttcaccgtcagatcaatactccttctgaaaattcccggcatcgacgggatcggttcttctttattttcgccctccattacgaagatcggcattacaaaatcattggttgtaagagaacattctcttaccagacttcttacagattcgtttactctcagccttctatttcttgaatgtatcattttggaatactttttgaatgaaatttaatgcaaatttactacaacttatataaaaaactattgcgtagaattgcagaagtaattatttttgttaaaatatcccttagaaattataatttgatgagaaaacttttacttttgtttatctttttaggcgcatttgttggattttccaacaatatgaaagcgcagattaaagagccggcttccttctctcagaagtctgacgacggagtgcttgttgcttatcctaatccggcaaaggatttccttattgtaaaggctaaagatcctaacctgaaaatcagaagcgtgattttctattcgattttaggtacgcaggttgcaagttattcagtcaacatgaattccggagagattaatattgaaaaactaaagcccggtaaatatttaattcgatatattctgagtgacaatacaatgaaagtcacgcagattatgaaacaataatttaaatcctgataatcatcaggattttttcttttagcttaattattccgtaactttcggaacatttttatactaattataaaaacaaattaatgctaaaagctgaacatattagaaagacctataacgcaggtaaaaaggtagctttggatgatttcagcatccatgttccgaaaggaagtgtttatggtcttttaggtccgaacggagccggaaaaacttcttttatccggatcatcaatcagattacacaggcagattccggagaaatacagatcaacggacaaaagcttaatccggatcatattaaagacataggatatatgcctgaagaacgcgggctgtataaaaacatgacggttggagatcagcttctctacttcggagagctgaaaggcatgaaaaagaatgatgctttgcaggaagctaaaaagtggtttgataaacttcacatcgaccaatggtggaagaaaaagctgtctgagctgtcaaaaggaatggcgcagaaaatccagtttgtggttactgttcttcacagaccgcatttattgattctggatgaacctttttctggttttgatcctgtaaatgccaatttaattaaagaccagatcattgatcttaagaataatggaactaccatcatcctttctactcaccgaatggaaagtgttgaggaaatgtgcgattatgtggctctgattaataactcaaaaaaaattatcgacggaagagttttcgatgtacgcgagaaattcaagaaaaatatttttgggatcacgctttctgatgtaaaaaacgatcaactggaaagttttcaaaataagtatgagattttcaatatcaataatgaaaataacttagtttcctttgatctgaaaaatgagactgaccagaatcatattcttctggatcttgtgaatgtaggaaaagtaaggtccttcgatgaaaaaattccgagtatgaacgaggtgtttattaatgcggtaagcaataattcttaattatgaataatatttttttaattacaaaaagagaatttcttacgcaggttaagaaaaaatctttcatcatattaacgcttttagctccgattcttttactgggttttggtgcggttatcggtttgatgtttaaggcaaatgaatctcacagcattattgaagtagtggataaaaacggtttgtttaaaaatcaactgaaatcgaatgataaactgaactatgtttttgtttcggcggcagatgaacagtcaaagatcaacaatctgaagaataatgaatctttagacggaattttggttcttccggaactgaacgaccagaattttgatgagttagaaaagaatacgagacttgttatcaataataaaatcgggtttgatacgaagcagaagattgtttcagatattaatgaagtcattaaaaaggaaaaaataaagaaactgggcattgcagaaatacaacttgataatctggacaaaagtttcaatttaaaaaccatcaacgtttcagaagacaataaagaagattctgatcttgctttcggggtgaaaagtgttctgagtatgcttttaatgtacgttacttttatgtttatcattatttacggagttagggtaatgagaagcgtactggaagagaaaaacaaccgtgtagtggaaattattatttcttcggtaaaaccttttgaactgatgatgggtaaaattctgggggtaacaatggttgcacttactcaatttatcgtttggatcacaatgtcggttatcggagctttggtgctgaataccggattttctgccattccgaagaacattccgggaaatgaagatgtcgcagttaaattcgatattttacagatcggaacccagatttcacacagtttactagagctgaactttccgctgattatttttgtttttattacatttttccttttgggatacatcttctacagttccatttacgcagcgatcggctctgcagtagataacgaaacagaaacgcagcagttcaccttatttgcggttctgcctttaatgcttggaatgtacggaagttttacattaatgaataatccggatggccctttaggattctggctttctattattccgtttacgtctcctgtggcaatgatcgcaagaattccttacggagttccagcatggcagattgcgctttctattggcttgcttttaggaacaactcttttcatgatatttttagccggaaaaatttatcgtgtaggaattctgatgtacggaaataaagctactctgaaggaaattctgaaatggattaaaggataataacttaaatgaaaagattatgccttataaaaaaatcccgaaactgagtgtttcgggattttttatgttttgattagaatcaatttttatttgaagatgtagcttaagcttacgctaagaacctgctcagattttcctttatcagttcctttcggctcctgattaagaccgggatatgtattcgtaattccgaaatcatatcttgccgtaagttccagctgtcttttatagctatatcctactcctagtcccattccaaagttaaatgaactcgctttaccgtttacattaggataattcggatcaatctgatcttttgtgtagtagattttaggcgcgtttttaacgttctgacttaataaaaaattaaatctgggacctattaacccaaaaaattcagattcagattcagaaaaatatcctttaaacgagatcggtacactcagatagttatttgcgtataccgcgtcataaccgggatagtttttagcatccttatcttttcctgtttctcctgctccaaagtaaactacttcaggctgtatgaaaaactggttggctgaacctatcggtattaaagccaatactcctgcctgaacggtatatctcggtccggaagggttatgagcattcttcactcgggaatagtttcctcctacagtaacaccgaatcttgtgttgccaaaatcgatctgtgcgaaagacatggtagaaagtgccaatgcagaggctaataaaaattttttcatatcgttatgttttatgttatcctagaatttttgcaacagtagcaccgatgtctgcaggagagtctaccacgttaattccgttttctctcatgatttccatcttagcctgagctgtatcttctgctccgcctacgattgcacctgcgtgacccattgttctaccttttggagcagtctgtcctgcgatgaaacctacaaccggctttgtagaaccacttgctttgtaccatcttgctgcttccgcttcaagacctccaccgatttctccgatcattaccaccgcttcagtttcaggatcgttgatgaataattccaaagcttctcttgtagttgttccgatgatcgggtctccaccaataccgattgctgtagagataccgtaacccgctcttactacctgatctgcagcttcgtatgtaagagtaccggatttagaaacgatacctactttaccttttttgaaaacgaaacctggcataatcccaattttagcttcttcagaagtaatgattcccgggcagttcggaccgattaatctgcagtctctgtcagcaatgtaagattttactttcaccatatctgctacaggaataccttcagtaatacatacaattactttgattcctgcttcagcagcttccataatagcgtcagcagcaaatgcaggcggtacgaaaataatacttacgttagctccggctttttctacagcatctgctaccgtattgaatacaggcttccctaagtgctcgcttcctccttttcccggagtaacaccacctactacgttggttccgtattcgatcatctggcttgcgtggaaagtaccttcgttccctgtaaatccttgtacaattactttagaatctttgtttactaaaattgacattttattatttatttaatttatttattacttttttaaatgcacacaaatttaattaaatttctttgatttaagataaatctaactaatttgtttatttgagatttctcagtttaacttcttttttaagatacgttttaaaatcttctgcaaacatcccgatgtaagttcctttttcgaggtctctgtttactccggttttccctaataatacagctccgctctcgattttatttcctgaagcaatgccgacctgtccccataaggtaacctcatcaccgataacacagcatcctgcaatgccgacctgagaggcgataagacatttttttccgatcacagtatcgtgcccgatctgaatctgattatccaaaacggaaccttctccgataatggtagaatctgtaactcctctgtcgatggtacaaccgtttccgatctctacattgttttcgatgactacgtttcctaccgaaatgagacggtcgaaattgccgttcagttttctgtaataaaaagcgtcaccgcctaaaacggtattagactggatcactacattgtcgccgattacggttctgtcaccaataacaacattaggaaaaatcagggtgttttttcctattttcacgttatttccgatgaccgcagaagcatgaatttttgttccctctcctatttcgacatcatgaagttcttcggtgaagttataaattcttgtaaaatgggtgttgattttattaaagtccctgaaaggatcatctgaaaccaacagtgcttttccttccggacattctacttctttatcgatcaaaataatggtcgcagcagaatttaatgctttatcgtaatatttcggatggttaacgaaaacgatttcaccggcttttaccatgtgaatttcgttcgttcccaacacttcaaagtcttctgaacctacaaattttgccccgataagttcggcaatggttttcagtttttggggttgatgaaacgtcatatttttttaaatgatgttttaaattttcaacggtgtcttaaaatcctgacacggctttgtttttccaactttaatcgcagcccgactgacccttcgacaagctcagggtacactacaaagctgccataaaaaatgaaagctgaaagttgttatacttccagcctcatattatttgtgaataattattcttttactctttctaagtaagaaccgtcttctgtacttactttgatcttgtctcccggctcaatgaacagaggaaccattactcttgctcctgtttctacgattgcatttttaagagcgttggttgctgtgtttccttttactcccggatctgcttctattacatcaaggtaaacagattgcggaagttctgcagaaagcggagtttcgtccacttctttcaaaatgatggttacttcttcacctgctttcataaggtttgagttttcaatcatttctttatttaaatataattgagagaagtcatcattattcatgaagtgaaatccgttctcatcatcataaagatactggaattttctggtaattacctttacttcttcaattttgtgacctgcagagaaagtattgtcgattactttaccgttggttacagattttaattttgttctaacgaaagcaggaccttttcccggttttacgtgaaggaattcgataactttataaatatcgttgctgtattcgatgcaaagtccttttctgatatcgttacttgttgccattaatttattatatattttttattttcttttgttaaattgtattccttctccctgagttggcagtctgttgaaaacattattattgaatgaattcacattattattcagcctgttcacattcgtctggatctcggaatgatagggatttgcggttccaaaaattgaatttccgccggaattattctgtttaagaagatcattaagattatgtttagcaatgctgtcattagattttgaaggaagtctcctttccagaatggaagtcttggctgttttctccgttttcaatccttctgtctgttgtccggacaaaaaagatactgtaaaacacattaaaacaaaaatcagacttttcattgataactgagctaaacttttctttattattctctttccttccctgttccgtatccttttacgattcctcgaggagaattctggataaactgaaggatttcatctctttcagccgtcggaagcatttctttttcgatgtaaagcaacgcttgggaaacattcatcttcatctggaaaattgccctgtaaattttctgaatttcaaagattttctcattggtaaatcctcttcttcttaaacctacggaattaattcctgcataagacatgggttctcttgccacttttacataaggcggaatatcttttcttaccagagttcctcccgaaatcatcacatgctttccgatcttcccgaactgatgaacagccgacagaccacccatcacggtataatccccgatttccacatgacctgcaataccacaaccgtttacgatgattacatgatctccgatcacgcaatcatgagcaatgtgggaagttgccataataaggcagttttttccgattttggtaaaaccgagagcttttgttcctctgtttaccgttacacattctctaatcgttgtttcatcgccgataatgacctgcgtatcttcaccatcaaatttcaaatcctgaggaatcgcagaaattaccgttcccggaaaaattctgcaatttttaccgattcttgcaccatccataatggtaacattgggaccaatccatgttccttcgccaatttccacgtcccctgcaattgtagtaaaaggttctacgattacatttttgctgattttcgcacgtttatctacggctgctaattgatgaatcatttaatcaactttattttttgcaacttgggccataagttctgcttctaccgctactgtatctcctacgtaaccataaccctgcatatgaacaattcctcttctgataggctctatcaattcaatcttgaaaataagcgtatctcccggaattacttttctcttgaattttactttatctattttaataaagtacgtagagtaattttccggatccggaacgcttgccaaaacaagaattcctccggtctgtgccaaagcttctacctgtaaaactcccggcattacgggttctttcgggaaatgcccaacgaagaaaggctcgttcattgtaacatttttaagacccacaacgtgagaatctgaaagctcaagaattttatcgatcaataagaacggcggtctgtgaggcatcagtctcatgattccgttgatatcgaaaaccggttcttttgttaaatcaaagtcaggaacatttttcttcttctgcaatttccactgacggttcagtttttttgcaaactgggtatttacgtaatgtcccggtttgttggcaattactttcccttttattttcactcctgccaaagccagatcaccgatcacatcgagtaatttgtgtcttgcagcttcgttgggatagtttaagttcaggttatcaagaattccgtttggtcttatggatacattatctttaccaaaggctttctttaatttttctgtagtttccggtgtaagatctttatctacataaacaatggcgttggaaatatctccccctttgatcaaaccatgatccaaaagcatttccagctcgtgtaagaagctgaatgttcttgcggatgaaatttcttctttaaattcagaaatatttttaagcgttgcattttgagttcctaaaactttggtcccgaaatctaccattgttgttacttcataggtatctgaaggaataatagtgatctctgatcctgtagcgggatcgctgtaggtaagaacttcttttaccacaagatattctcttgctatattttgctctactactcctacactttcgattgcttctacaaagaattttgaagaaccgtctaagatcggcggttcggaagcatccatttcaagaatggcattatcaatatcacatcctaccaaagccgctaaaaggtgctcgcaagttgtaatctttactcccagtttttctaatgttgttcctctttctgtagctacaacgtaattaacgtctgcttcgacttgaggatgcccttccaaatctgtccttacgaatacgaaacctgtattttcttttgcaggtttcatggttaattttacttctttaccagtatgaagtccgattccggaaagtgtcacttcctgctgaagtgttttttgcatatcactcattagtttaatcttttgagttattctcgagattatttattctttttaccacttcaggtaagtttctgaaatgtacatagcttctaaggtagtcgttgtaactgatcgccggagaaccgtagatggtttctctgtcgtttacgctggaatttacgccactctgagcctgtatttttacctgatttcctattttgatgtgtcctacaacgcccacctgacctccaatctggttccagtctccgatggttgtagatcctgcaattccggcttgtgcggcaattacattgttttttccgatttttacgttatgtgcgatctggatcaggttatcgatctttgttcctttgccaataacggtagaaccaatggttgctctgtctatactgcaattagaaccaatttccacatcgtcttcaatgatcacgtttcctaactgcggaatttttttgaatccatccggagttggctgaaatccgaaaccgtctcctccgatcactgtgttggaatgaataacacaattgtctccgatgatgcagtaatcataaattctcgcaccactgtcaattttgcagtttttcccgatcttcaccccttttccgatgtaaacctgcggataaatctggcttccttctcctacttttgctttttcagaaacgtaggtaaaagctccgatatacacattctcgccgattacagcggtttcatggatggaagaaccattttcgattcctgttcttctgccctgcatttcctgataaagattcatgagaatctggaatgagagataggcatcctttactgtaataacggtaggattgtaagaatcttttgagatcagcttttccgaaacaatgataacggaacattttgaagtctctaaataatgcgaaaatctatcttgcgcgatgaaagaaagatgtcctgtttccccgctttctatgggcgaaactccagtaataagtgcgttctcgtcacctattatttttccgtcgataaaacttgcaatttgcgaagctgtaaattccatattctgcaaagataagaaattctgtaattcgcaaacattttttagttttcggaacgtaaattttaatattctttaagaaataatgtgtgaaatattccttggaaacgtaagaatataccttgtggttttgtttctcatgagacctgataaaagctggtcttccgattcatcaagacgtattttttttccgtttttctgcaacagataaatgggttgtttttcggtgtcataaggaagaagttttcttttaatttcatgtacaagttcttttccattatcaattccgaaaaattcattcacattctttattttttcttcaataaaactttgctcaaaaggatgtgaagaaattatggttttcggaaggtttctctggatcacacatttacaccagtaagacaagatcatatcatctgcattctgccagtttttcattgcctgaataatatcattgtcatcaagctgtgtaaaacgctccacatcttcatctgtcgctgtactttttccgcgatgcagaaaatatttcagattctcagttgccggtaaatcgattccctgcgagaccagaagtttggctctttctaaaattttaacgagaagaaattctgccaaagcggatgttttatggtaatatacctgccaatacataaacattcttgccgtgaggaaattctcaatagaataaacgccttttgcatctattaccaattcgccctcatcacagacgttcatcatggaaatgattctttgcgtattgatgcttccttcggaaactcctgtaaaaaagctgtcccgtttcagataatccaaccgatcgacatcgagctgtgaggaaataagctggttgaaaaactttcggtggtattttccctgaaacatttcgatagcgcaggacaattctccgttaaattcatcattcagacgattcattaataataaagacagtttttcatgatgccaatcgtccatcagcatactttccagagcgtgggaaaacggaccatgaccaatatcatgcattaaaatcgccaacatggctcccttttcttcctcttctgaaattttcacgcctttctgcttcaaagtttccaaagcggtaaacatcaaatgcatggctcctaaggcgtgatgaaatcttgtatgtgtcgcgccaggaaaaatgaggttcaaaagtccggtctgcccgattcttcttaatctctggaagtaaggatgctcgatgatgtcgaataaaatttcatgaggaattttgatgaatccgtgaacgggatcgttgatgatttttagcttgttctgcattggaaaacgtcagtatttgtaacaaatttaggaattttatattttagaggtaattaattttcattaaactatttgttgttttaaaagtaattttctttgttgaatttgtttttagcacaaagtccgcaaagattttgtttacagttgtgctgcatattttcgttcgcaaaagcgtttcactcagcaaaagctggataaaatcttctttgaataaagagttgtgctgtttgtgtttaaaaactatctttgactgaataaccttttcatgagaaagttctcccttttcattatcttatttttaaacttacacttttcggcgcagactttatcggaaaaccaaaagcttgaatcgttatgcaaagtctggggatttttaaagtattatcatccaaatgtggcgaaaggacagtttaactgggatgagcaattatttcagaaaattgatgaacttgaaaatattaacaataaagatcaattgaatgaattttatgctaactggattgaaagtctcggaaaagtagaagattgtaaaaattgtgtaaatgataacgataaagtttatttcttaaaaaattttgatcccggatggatggatgatcggcaatttttttctgaaaatgtaagccaaaagttgaaatttattgagaataacaggaatatcggtgaaaattattatttcggattaaacggaagaaaggtttatttcaggaatgaaaattcttacggctcgaaatttacttcaaaacaaactgctcttcttgaattgttcagatactggaataatgtggaatatttttttgcgtacaaatacaaaaccgatcaaaactggaatgatgttttacgggaaatgattccaaaatttcttgcagttgacaatgatgaaaactatcatttaagtttagcggaacttgtaaccaaaacggatgattcgcacgcttttttattttcaaagctgaatagtgtaaaccaatacggaagaaagaatgttccggtgcagtattcttatgcggaaggtaaactggttattaccaaaatatttccgactatttttaatgaagaaaatccgctcaaaaccggagatgttatttatgatgttgaaggattaacgattccacagaaaattaatttatttggaaaatatcttccggcttcgaattcgtggggaaagatcaacaagtcgaaatatctttttctgtacaccaataaagattctttggagcttaaaattgaaagagagggaattaatttagttttaaaagtaaaaacatatttgcagaaagaaattattcgcgaaaatcctacggttcctgaaaaatggaagtttctcgatgatgaaaaaaagatgggttatgtgaacatgggattaatcaaaagatctgatctgaatgatatgttcgaaaatctgaaaaatacagaatcgatcattttcgactcccgaaattatccgaacatgacgattttacctttaagcaggttgcttcttcctgaaaataaaatttattatgaatttatttttcctgaaactaattatttaagcaaattttaccgccgcaaaaacaacatcggaagaaataatccggattattataaaggaaatgtggtcattctggtgaatgaggtgacgcaaagtcaggctgaaactaccgtgatgatgctaaagcagcatccaaaagcaaaagtaatcggtgggtacacttcgggagcaaacggtgatgttatttcatttaatattgccggtcttaaaacgtgttttacgggcttgggagcgtattatccgaacggaaaagaaacgcagcgaatcgggattattccggacattatcgtacgaccgaccgtgaagggaatacagcagagaaaagacgaaattatggaaagagctttggaatatttaaaaagtggaaattaaataaaagaaaaacgtaattattgcgttatttcatttaacttatatttaactttacctctgcggattttggcagattttagaaataattggtcagcaatttgatacaataaccatgtaaaaaaataattatgtcggaaaagatattatggatagatgatgaaatagatctacttaaaccacacatcgtttttcttgaaaaaaagggatatcatgtaactcctgttaacaacgttaatgaagcgcttgaacttatggattctgagaagtttgcattaacgctgattgatgagaatatgcccggaatttcgggactggaagctattccgatgattaaggacaaagacaactcactgaaaattgttatggtaacaaaaagtgaggaagagcatattatggaagaagcaatcggatcacagattgcagattacatcctgaaaccggtgaatccgaaccagattttactttcgctgaagaaaaatcttcaggaggacaatcttgtggagcaaaagacgattttgcagtatcaacaggaattcagaaatctttctatggagctttcttatttaagaacgtatcaggattgggcggaatattataagaaaatcctgaactgggaaattaaatttgataaagtaacggataatgagtttgcagatcttcttcagtcacagaaagaagaagcaaatattcagtttgccaaatttattgaaaagaattatgaagactggctgcacgattcggataagccgattatgagccacacgcttttcaaggataaagtgaaacctgaaattgaaaaggataaagttttgcttctgatggtcgataatcttcgttacgatcaatggaagatgattgagcctttgtttacaaaatattataacaaggtttctgaggattattattacagtattcttccgactgcaactcaatatgcgagaaattctttttttgcgggtttaatgccttcagagattgaaaaacgttttcctgataaatggttcaacgataatgaagaaggaaataaaaacgaatttgagcgtgatttcttagaagatcaaatgaaaagaatcggtctaagctcgaaatccatgaagtatctgaaagttctgaatgctgatttcgaaagaaagatttatgacgattttaatcagcataaaaacaatgacctgttggtaattgtttataattttattgatattctttctcatgcaaaaacggataatcatattgtagatcaactgattcgtgatgataaaacattcagatctttaacattgaactggtttgagaattcttctttactgaaaattattaaagttgccgctgaaactggtttcaaattagtaattaccacagatcatggaacggtttatgtgaaaaagcctagcaaagttgtaggagacagagaaacttctacgaatatccgttataaaacaggaaaaagcttaacgtatgatgacagtgatgtctgggcaattacgaatcctgaaaagttatttttaccaaaaggaaatttaagctctaaatatatttttgcgaagaataatattttccttgcttatccaaagaattacaatcactttgtgaattactataaagaaacgtatcaacatggagggatttctcttgaagagtgtatcattccattcagtattttagaacccaagtagtttttcatagtttgacttcgggtgacgagaggggcggaaaaaatcaaagattttttccgcttcttttttattaatacttttgaatcatgaaattaatcacttataacgtcaacggaatccgtgctgcatttaccaaagattttttaggctggctgaaaacagcggatccggacatcatctgcattcaggaaagtaaggcaggaaacgaccagatcgatattgaaagcctcgaaaaactggggtatcacagttattggcattccgcagtgagaaaaggctacagcggcgtcggaattgcgtctaaaataaagcctaatcatgtagaatatggttgcggtattgaaagctatgataacgagggaagaatcatccgtgcagattttgacggattttctgccatttcagtgtatgttccttctgcttcaaatattgaacgactggattttaaaatgcagttttgccatgattttttagagtatattaaaaatttgaagaaagaaattccgaatctgatcatttcaggagattttaatatctgtcatgaagcgatagatatccataatccgaaaggtttacaaaatgtttccggttttttaccgatggaaagagaatggatgacgaattttatcaacgaatgcgaactgatcgacagtttcaggttttttaataatgaacccgaccattatacatggtggagttacagacagaattcaagggaaagaaataagggatggagactggattataatttcacttcctacagtttgaaagataagctcacaagagctgttattctgaaagaagccgtgcattctgatcattgccctgctttggtagagttaagcctttaaaacaaagcaaaaagccaactgagtcagttggctttttaaaatttaaaatcataaattttagtcgacaatttcatattccaccggaattgtacctctgtcggtatctccgatttcatcgaacgctgctttagacatatctaaagctcttgatgaatggtaaggtcctctatcatttactttcactattacctctttaccattgttaaggttggttaccttaatgtttgttccaaatggaagcgttctgttggctgcggtgaactttgcattatcaaagatctctccgcttgctgtttttctaccgttaaatttatcgtggtagtacgatgcataacttgtttttttcgcatctatggcattcattttgaaagaataaataccaagggttgaaatcatcattatgattacgagaatgaatcttttcatcattttgaaattttattggttttgactggggcaaatctataaggaatcttttaatacacctattttatttgttaacaagtgttaatgaaaataaaattttatgttaatatttctcttaactccctatgaacaggcgatttatatgctattgttaaaaagtgttaaaaaaaaatgctaaaagttaacaattttaactaaattattaagattaagatatttttaacacaaacatttctctattaatcaataagttaatgaattttatgatttaaattttttagcctaaatttataggagttcttagcttacaactaatttgtctgatattaataaagaaggttataagttacgtttaaaatagctcggattttaatgtaaaaggtcaaaaaccaaataaaaaacaactttgagatttaattgattgtattagaatttagctggatatagggattagacaaatcaaaattgataatgaccaatattttataaagattattcgtttatattttgtattgcatctgcatcaactttacattatataaataaaaacacatacgaaagcaagattaaattgtcctttgtaaaagaaataaactttacaaaattaaaaaaccaatgagaatgctctcattggtttttatatattgttgttattcaaatgttatttgaaatattcaattatatagtcataagtatctgccggataaactacggacatactttgagagcctgtaatcgcagcaccagttgtagaatcataagaatataattctttagagaatacaactttgttacctgttgaagcctttttaaagatggtaattccatacattgatgtaagaccagttggaacagctaacgttacagctgttgagcttcctgtagtagtaaattgtcctttatatgcataaacctgattaccatcaactaatgtatttgttgcaacacctgcagcagcattgtttacggcattgaatttagcagaagcagcccctaatggcaaccatcttccgtttgcaacactggtagattgaccaggattagaaaagtaatagaatcccggagttacagccacctgaacgccttgtccggtaaccgtgttaccagtaccgctattatagacaatcattccatcaaaagcagtcggaaaggttataccatctaaatttgttgttctaaatgtccaagttgttaaattggtagtaggaaaatataatccttttcctacgttattagctgtacctgtagatgcagtatcaaaattagtagaagcgtcaaaaaatggattttctccagtgatattattggctacaataccattactagctacctgagcagatgcagagtttaaaccaaatactgtaagggaaactcctaataaggctctaaatatattatttttcattgcttgttgtattaaaatattaatgtattatctacttgcgctattccaccagttagttccatctgaaataaacatagcggcagaacctccggctaagttagggaaattcaccggccatgcaacaccattcgcgtttgtaggagctactgcccctcccgtattatttctaatcataagaactctaccagtatttgctcctgtagggcttggtaatgcaagctgtccgctgatagcattatttgtaataacaactaaataatcgctagaattccagtctacgttagtagaacctgtatatgttcttacactggtagcgtatacagcaccttgtgtctggaaattaccattcactattgtttttgctgttcctgtagaaaaagttaaattattattgttttgtgttacagttctatttgctgccaaagtaccatcattaagataaatacttgtatcagtagcagaaccaccaccaccaacagcaacccaaacagagtttggtgcatcatagtaatagaatccggtagccgtaatatttactgcttttccagtagcagacccatcagcaattgaggaaacaaatgccaatgctccgttttgggtggcagtatacactgcatcttttccctgtaactgacctcttgttaaacgagggaccaataatgcgtccggcttagttgcgtcagcaggagcacctacaacatccaaagtcgcagcgggagtagttgtattaatccccactcttccttgctgagcctgagcgatcgctacaaatccgactaacatagtcgctgttaataaaaattttttcataagtttttaaagattttaaattacattttaaccaatgagtgcattgttaaatcaggataccatacccaatttgtgcattcattaatataaataaatatttttaattatataatttcaaaaaattattttcacatttcacaagagtctaatttttagctcaatagttatgtaaaatctctttatttcgcaaagttaatatttttaaaattaattttcataacaatacataaaaaagttttaacattttaattttcaaaaataaaataatattgaaaatcaaacaattaaattctatgcaagcaatgttttattaatgttaatttttattaatcattgaataacattgtattaatgaaaacaatatacgattttttttactaaaaaatcaaacaattgggaataattttaaattaattcgccatacagatcaaattcctcagcagaagtaatttttacttctgcaaaatcaccgatggaaatgtatgtattttcagcagaaaccaatactgtattgtctacatcgggagaatcatattcggttcttccgatgaaataatttccttcttttctgtcgaatatacatttatatatattgccaattttctcctgatttttctcccatgaaatctgagactggatttccataatttcttccactctggcttctttcacttcctgcggaacatcatcttccagaacatatgctcctgtattttcttcatgagaataagtaaaacagcccagtctgtcaaatctttgttctcttacccaatctttcagctcattgaaaatttcctgagtttctccgggataaccaacgataagcgttgttctgattgccatatccggaactttctctctgaattttccaagaagagcatccgttttttcgtgagttgtccctcttttcatcgattttagtaaatctgaattgatgtgctgaagcggaatgtctatatagttgcaaactttcggttcttctctgatgatatccagaacatcttccggaaatccgctcggaaaggcataatgaagacgaatccattcaattccttccacttttaccaattcctttaaaagctctccaagcgcacgttttttataaatatctaaaccataataagtaagatcctgcgcaatcaaaatcagttctttggttcctttttttgccaatttctgtgcttctgtaaccagcttttcgataggtgtagaaacgtgacctcctctcatgagaggaattgcacagaatgaacaaggtctgtcgcagccttcggaaatctttaagtatgcgtaatgttttggtgtagtggtaagtctttccccaaccaattcgtgtttgtaatctgcccctaaatgttttaataaaataggaagatctctcgtcccgaaatattgatcaacatccggaatttctcttaccagatccggcttatatctttccgaaagacatcctgttacaaaaactttctcaacttctcccctgttttttgcttctacataatcaagaatcgtattaatagattcttctttagcattgtctataaatccgcaggtattaattacaacaatgtctcctttatcttcatgtaccacttctttgccattggctttaagctgactcattaaaacttcagaatcatatacatttttggaacaacccaacgttactacatttatttttttcttccctacagattttgtacgcatctttttgattttgagtttgcaaagatacaaaatattgaagagtctgtattaaaaaataaaaaccacttcaataagtggctttcataatattaaaaattcttttctttaaagcttgctgcattttcatccttttcagaaagtacagcttcactgtcagaaattttccagtcaatattcagatccggatcgttatattttacacatccttctgattctttattataaaaattatcgcatttataagaaaaaactgcagtttcgcttaaaactgaaaatccatgtccgaaacctcgtggaatataaagctgtgttttgttctccgccgtaagctcaatcccaaaccattttccaaatgtaggtgagttttctctcaggtctacagcaacatcccagactttgccttccagacaggataccagttttgcctgtgcgtgttctcctttctgcaaatgaagccctctcaaaacaccataagaagatttagaaatgttatcctgaacaaaatgtccgttcattccggtaagttcctcgaatttcttttcattgaatttttcgaaaaaatatcctctctcgtcttcgaaaattgtcggttctataatataacagtcctttaaaggagtttcttttattttcataacttttatttcttgaatcagtacttactatagttgatattgtttttttaagctccatttcaatccgagataaatgatgcctacgggaataaaaatcacaggaataataatccagattgcccagtgtgaatatattaaaaataaatttataattgcctgcaccaatgcataaacaaaacttatcagtaaatgagaaatctttttttcgttggcaaagagctggtataaatgtcttctgtgtgcctcaaatatattttctttaagcagtaatctttctattatggtaagaactacttcgattccgtatacagaaagaagaaatatatatttatagtcctgagttttcataatcagtaaggtaataaggccaattacccaaaaagcgattcccatacttcctacatcaccggcaaaacattttgctttttttctgaagttaaagaacagaaaaacgatgcaggctaaaacaggataaagaataaaattttcatcggtgaatgcaattaccttttcattaatgtataataatgataataagccaactaaactgtataaacccgtcattccgttgatgccatccataaagttataagcattcaatgttccaataatcagaataaacaatacgggccaaacccaaattggcattaaattaaatgctcctgtaaaatacagcagtaaaaccacagaaataaaatgaacggaaagccttattttatttgaaagggttacaatatcatctataaaactgatcgtacttattgccagtaatcctaaaccaaatgaccagtagttttctttgacttcattaaaattaaatgcagaaaatataatgaaagcaacaggaaaaataattcctcctcctctcaatgtgatctgtgtatgtgcacttctgtgattaggcttatctataatattgtatttatctgctattctaaaatagatgagcatagatataaaaagcagaattgttacgattaaaaattccatagtttacagttgaaatttttctattacgtttgaaggattataatttaattctctctttattttttcattagaaaatgtaagagaatctgttatttttctcaattttaaagaattaatcggagctttatttcccaataagtcacccactaaagccattgattttgccagaaaaaaaggaatacttttcggagatttcttgtttaatttggctgatattttttcagagatttctttaaaagcaggatttgcatcatcacaaacattataaattccaccctcttttcccagcattttcacggttatctcagcaaaatcttccacccagaatacactttttcttgctgttcctcctgcaatattaaaatattttcctgatttaatcgctttaatcatatctcccagattacccggaggattgggtcctgcaattaaagaaggtctgagaatgaacagttttacattcttttctttgcaccattttgtaagaaattcctctgccatcaatttgcttttagcgtaaggcgtgtatccttccaatggcatagtttcggttatgtcttcaccgaaatctttaccatacactgccactgtgcttataaaaacaaaatattccggcagattttcttccaaagcgttacaaaggttttttgttccttcaaaatttactttgtaaaatacactttcttcttccttagttttaggaacagaatgcgctttaccagcagcatgaaaaataatatcaaacttttctttaaaaggaattatggcatcggtaatattaaatatataatctgcattggaagttccaaaggtctttacttcaaaatttttcttctgaagcaaaggaattacattttttcccaaaaaaccgttggctcctgtaaatagcactttcatttaaataatattataaaatttattcagtatgatctcttctgaaaatttttcctctgctacttttcttgctttttgtttcattatttctaattcttgaacagacgtttcatcgaaagaattaaaaaaatccagcattttctgttcttcgaaatgctgaaatgaataccctatattttcttctctcaaaagtaaatctatttcgctgtttttttctccaacatataaaaccggttttccggcagctaaaatattgtatgtttttgaaggaactcccaatccgaacattttaggcgctaaacttacaaatgacacatctgccttatttaatacctgaagctgatcttctcttgaataagctccgtcaaagaaaacattcttcagcttattttcctctacatattccaacatcgtattcttaacagctccttctccaacaaaatgaaaaaccagccgatcgttttccactttttttataatatgcaataattcaattaatccctgaactcttcctaaatttccggcatactgaaaaatgattctgtcttttaaagatgaatcctcattaaatacatcttctttcaagagtggataaataccttctgtatctccccagttttcaatgatctcaattttcgaatggcggttatattttcttattttagcttcaataactttctgcatatctctgcctaatgtaatcagcagatcagcttttgaatacgctttatcaaaaatacttctgagaactctgtataatactgacttttcagatttaatgattccggcaggaatggtattttcgggaaaaacatcatgaaccagaataactaattctatttttttaaatcttttaaggattgaaacaagcagaattaaaggcgccggattcgtaaccataaaaaccttttctccctttttaacgtttttccaaagatagaaaaagatagaaagagacagaaaaacaaatcttagagatctgctcaacagactgtttttgtttccgccccatccttttattctgtgaacatttacgcgggaatccagactaaaatgactgcttttcttttgcttgtcatacacaggatctccgcaaacaacttttacatcatacttttccgaaagtctgtttgctatttttgtgagaataaaagaagttgaagtttcttcaggataaaaaagttcggttgcgatccagagatttttcattattttttgctccaaacaactctgttaacgtaatccgtataacttagaataattcttaccattttctctgaaacattcggcattgaataatctgaaaccagtctgtaatttctttctgttcctgctttctgctgctgaagctgcgttaatccctgtaagattctttccggagataaaccgaccatcattacagatgcttcttccattgcttccggtctttcatgtgcatctctgatgtttaatgcccggaaatttaagatggaagattcctctgaaatagttcctgaatctgataaaacagcataacttctcatctgtaacgcattataatcgtggaatccaagcggttttaagaactgaatttccggtcttacctcaacctgctttttatcgatcatatttctggttctcgggtgtgtagaaacaatgatcggatagccaaatttttctgcaatggcatttaaactttctattaatccgttgaagtttttctcagaattaatattttcttctctgtgagatgataccacaaaatattttccttcttctaaattcagacggcttaaaacatctgaactttcgatctgaggaagataatgattcagcacttcaaacataggagaacccgttttgatgattctgtccgcaggaagaccttctcttaaaagatattctcttgcaatatctgaatacgttaaattaatatctgcagtgtgatctacaattttcctgttggtttcttccggaacacgctgatcgaaacatctgtttcctgcttccatatggaaaataggaatctgtcttttcttggcaggaatggcacaaagacaagaattggtatctcctaaaaccaaaaatgcttcaggctgcaattcttccaaaagaggatctattttaattaaaatatttcccaccgtttctgttgccgttttacctgctgcttccagaaaataatccggtttacgaagtcccaaatcttcaaaaaagatctggttcagctcgtaatcgtagttttgacctgtatggacgataatatgttcaacggcttcggaagcatccaaagctgataatactcttgatagtctaatgatttccggtcgtgttcctacaaccgtcattacttttagttttttcattgtattttttttgcctttgcaaagataaatttttaatgtctgtttattcgagaagcccgtgaagtttacaattaaatattattaaacttccacaaaataggtatctgaatcttcgggattaaagggttcattgatccagaaaatagtgtatagttcttcttctccgatgtttttaatattgtgggtataccaaatcggcatgtctacataagcaggttcgtttccgtctaaataaaaatccagaacctcatcgctgtctatttttcttaattgaataagagctttgcctttaattaccgcaaatctttcgatttttcttatatgaaaatggtttcctctggtaattcccggaacggtagtggaaaaagaacactgtccgccgattcccaaacgaattacttccacaaaagctcctctcggatcggtgtgctgtgtaaattttacgggataatgatttttaatatcaaaataacagcggaatgtattgaaaagattaagatcgaatttcgtttccaacaccggaatttctccgttatcaaaataaagttttttgtaattttcaagtttagctaaaacttcagaaactttatttacggatgtgtgaggaacatcgtataattcgttggttcctgcaacttcaatctgattgatgatttcctgaacaagttctccgacatagattaattttacttctccatcattatcaatcacaggattttcgccgtgggtaagtttatgacagaatgttgcgatgaaagaattgtaattcggttttccaaaaggtccgaaaacgttaggaataatcatccctgtaaatttgcccccattgttttttgcccagtctgcaaataattccctgccttcttttttagatttaccgtacagattatctctttcttcctgagaagatgatgagaaaagaacgtgtgcttttgatcctgttctttctaaagaattctttagttttttagccaattcaacgttgttattaaaaataacttccggatcgggatggcggttcatcgctgcaagatgtactatgacatcacattgcttcacaaagtcgtccagtttttcaggagattcaaaaaaatctctttcgaaagaaattctttcaaatttttcaggctgtaagcccaaagtgttatataaatgcgaaccaacgaagccgttttgtccggtaattcctacttttttcattgctgtaaatttttaaagtaatcaatagaaaatcgatgatcatcttctatttcccccaaagcataatctgccattaccaataattttgatccttctactttggattgaatagcacttgcatatccttgtggaatatgaagaatatccaactgatctgcatgaagttcaaattccaaaatttctgaatcttttgagggtgtttcccaatgatcaatttttattaatcttatgataaagattccctgtaatgcagagaaccatcgctgttcagttttgtgacctgtccagcctcttataaaatctgcatctttattttcgatacagtatattcttttaattgccgaaacatcaaaggtattgttaaaaaacaaactgcctctttcgtcagaatattttcctccttctatgattgcaggaatagccataataaaaaattaatcaggatattgcattatatcttctcctaaaacctcttttctgattaaaggaagttttaataaaagtttcttcatcccttcaacatcttcctgttttgtattgtgagagtgataatcttctattttggaaatatcttccactccttctgaaaaatactgtgcgtaattaagatctctgttatcggcaggaattctgtaaaattctcccatatcttctgctttcagcatttcctcacgcgtacaaagagtttcgtatagtttttcaccgtgtctcgtcccgattacttttaccggattatcggctttaaacatttcttttaaagcctgagcaaggtctccaatggttccagcaggtgctttattaacgaaaagatctcctgagtttccgtgttcaaaagcaaaaagaaccaaatctactgcttcctccaatgacattaagaatcttgtcatattcggatctgtaatggtaatggattcaccatttttaatctgttttacaaataatggaattaccgatcctctggaagccattacgtttccatatctggtaaggcaaaccgttgtattttccagattacgtgatgcggcaactgctactttttccatcattgctttggaaattcccattgcattgataggatatgctgctttgtctgtacttagacagattacttttttcacattattttttgcagcggcatcaattacgttttgagttccttctacattggtttttacggcctgcatcgggaaaaattcgcaggaaggaacctgctttaaagctgcggcatgaaatacatagtctactcctctcattgcaggttctacacttctgtaatctcttacatctccgatatagaatttcagtttatcgcttttaaactggtttctcatatcatcctgctttttctcgtcgcgcgaaaaaatacggatttctctgaagtgatctgtattgatgaattttcttaaaacagccgttccgaatgaacctgttccacctgtgataagaaggactttattttgtatttccataatttatattttaatgcagtaaagaaattaatgtattgatttcattctttactttagactccgagtttattgtatttttttgcaaagatagtgataatgcttcagtaatagaatctacttccaaaggattaaagaccagacttggtttgcagactgcataggtataaggtaaatctgcacctataatcttacagccgttttcaatagcttcgactaagcctaaaccgaagctttctgcaaatgaaggaaaaataaggtactcatgagactcatagatctttttcagatcatcacgtttgataaatcctaaatttttaattggatagcctaaattctgcttatcttttacataattaagtacgtcattaaattcatcagaaaccgtaaccgttagactgccttttttatatttatcataaaaaagacaaaaagcatcaattaattttacatgattcttatgaatggatgcattacttacatagatgtatttattttcttttctttcaaccgtttcattactatttttaaatggtggataaaagggcatcaaaagaactttttcaccgtctatcttatacttattcttaaagccagactgaattagttcagattgaacaagccagaaatctgtattctttttaattgaatttaaaattttagttttaatccagaattttatacggtctttcagaggcatattcttggggagctctaagaataaaggctgatgaaaataagtatagacggtagcattttttatttttatgtttggaggtagatttccaaaacaaaggatttttgaaaatttatctttattttctaaataaaattgttttcttttgataaaacttgattctaaaaaacacttttggcttttggggttaacaggataatatgtattctcaattcttttatcaaacagataaaagatttcaatatccagtttatttaactcttggattaagtaatccaaaagcacttttcctccgccattatttatatataatgcatctataagtatcatgaaattacctgtaataaattagcgattgatgtgtcgtgggttatagaattacccaaagttctgctattgtaagaaaaattgagaagttcttcatctgttttactgatgagcttttctatagcattttttaataaagctgtatcaggttttaccttatacccattataattattaattacgaaatgaggagatgcaccgcaaacatccgtacaaatgataggtaaacccgctgaagctgcttcgtgtatgactaatgcccacggttcaaaagtagatggtaaaataaaagctccggaattttgcatttcaagcaataaattttcctgactcatataatcttttactatgatatcattatgcttgctaatttcgtctttcatatctcctctgcctacaagaactaagttccattgttttttatcctgaatatctttccatgcgtttaacaattcttttattcctttttcttctgagaatctaccgataaacagtaaatttttaggataactcttctttttttcttcaatattgactctattgaaaagttcaacgtctgcacttaatgaattaagaagtatcttattattggcaaagcctaactttcgtgcgtattcgtattgataataaccggcaacccataaatgagtgaaagcttttgaaagatgaaacggactgatcgcactattgatcttttgagtaatttttccataccacggcgtatctgactgtgcaactacgggtatttttccctcttttgtaatctgtttgcaaatccaaataaactctttaatcatccaaccggcggtaacaataaaatccggttgaaagtcttttattttttttaaaatgtcttctttggtaaactgattatattgatgtgtttcaaaattttttatttcaggaatagttttatcaaaaagagcaacgtgaaatgctaaaactttaccgtttgttttttcaactaatttttttattgtattttcctgatgaggaacatagtcaataattaagaaaactgctttcattttactgctatttttgtttaaagattttcattatttaacatgtttaataaattttgcaggtacataaaaggatttacaataaatatttgtgttctgtaaaattttatctccagcaaaatagttgaatctgcacatatcctgcttctatttctatcataataaaataacttatcctttcccttttatatttatcgaatgagatttagaactaagaattgatatcctaatttagctcctggcattactacttataaaaaatcattttcttctaaaatataaaaaacaaaatttcacattatcttatcttctacacttactaagtattttatttttaatacgtttagactttaattaagaatcattatttcttgtctaaaatcattttataataattaatgtatttttcggcaattatttccggaaaatactttattacattttgatgtcctaattttaataatttatttcttaactcctgatcagaaattatgtcgttaatggcttttcttatttcttcggttgagtttggattgacaagaattgctccatctccagcgacttctttcatagggctcatatcagacgttataacacaacacttcatcgcttgcccttctaatattggcaatccgaaaccttcatacaatgaaggaaagcataatatatcagaaattttataagcatcaattaattcatcttcagttgctatttcataattaatatagtcaatatcattttcttgtaaaaatttcattacttcggaagataatgagccaataataattattttaacatcaatgccaacgatagcctgtaaaactctgtataggttttttttaggatagaatccatatgctagaattactggctttgaattgacaggttttacaaaatcctgatagggtatgctaagacaattgggtattactgttattttattttcagcccatggaaacagttctactaattctttttttgatttttcagaaattactgtaatatattttaattttttcaacggtaagtaaaaccaaagaagtttaaaaagatatttttttattcctctgagttctgaaatatttccggcatcgtgtatagtaagaactgtattttttctttttaacaaaaatacagaccaatgtatagctcccgtaatatggtttatctcattttgattttttctaaaataaagattagttctaataaatccgaaaaatgaaaaatttggatctacctcataaatatttttcgtatctatacctctattaatcatttcggcattgagtacggaaaatagttttgctatactcaagaattttggatttgggaatctaagaaaaaaagtaactttcatatgattttaaaaagaaaaaaataaagttttgaaaggaataaaaggagttggatctgaaaatacatattttgtaaattctaaacctgcaaacaaaagtaaaaaaattaaataaagatttttcttacctattttattcataaccggaataagccaaacatataaaataacttctaatattataaaatacaccgaaactctggaactcatgtactctaactttccaaaaaagaatacataggaagccaatgaaaaaaatagggtatttaataataattgataataagatttatgttgtaaaaaatttttataccgaatcataagaaatattggtaaacctcttcttatagtaccaagtacaaacatataataatttgattgcatttttgcaaagcctatattatatcctttaataatatatgatattttttcaggagcaaaattactaattacaaaattaaaaattgtaaaattaagacccgtaatattaaataacaataaagcaaacagggtaacaatccaaattttatcgtttatttttctatctaaaaaaagcaaaaaaacatagataaatgcagaatagtgaaaaaaagtagcaattaaaataaaaaccagatatgatattttcttttcctttaaaaaataaatatatgcaaaaaaaccaattgcaattgctaaaagctgtcggttactcccaaaaagtccaactgtacaggcaaatacaagtaataatccagttattgggtatttagtaattttatttaaggaaaaaaaatataagctataaatgacagaataataaaaaaacaaaaaaaacggatagctgaaattcagaatattcctgaaaaaatatactaaatatttgtacaaaaattcataccgatatctggtgtcatttaacttaaaaaactggtaatgattataggtattccaaaagtccattccggaatcgaacttgatagattccaataagacaataaaaaaaagcgataatataaataatgcctgatgaaaattattttttctctggtgctcgattactgtaaataataagatcaataaaaataaaataattatcatcatcgtttttaagataattatttactgataacttttttgaaaaagatttttgaaaagaaatagtatacaaaaatcatttgaaataaagtggcaataaagaaatacacatcctgctctatgataatactttttatcaaaacctgagagtaaaatatgaaataaaacatactgcccttaaatggaagaaactgtatgatgtttaatacaatagaaagaatagcaatatgtaaaaaaacaaaaattaacccaccttccagatatgcccatccatatacggttggtgtaggcgaattttttacgccgtttactatcattttctgtaattgtactccattttcctcaattggttttgagggtataaatacccggggtatcatactcacaggtaaatatacaaacctttccatatttttataaaaattccaatctttttctttttcaattgaaaacaataaataagaaaacatggagatccgatctgaatagctgtttgtattttcattcaagctgcctgaaaagtcaatatttacagtttttaccacagcaatttgcaatgcaactattttagaatccgtttttgttaaagattcacgatagttattattgaatggatataaaatcattagaaacaaaattaaaggtatgattactttaaccggaacacctcttcctgatgctaaaaatggtattaaaaataatactattccgaaaattaatatccccttcatcccagcaattaaaccaaaaactatatagagaacattgtataatttgaaactgttcgaaaataattttgaattattaccagataggaattttataatcacatacgtaaaataaaaaagaggggaaaaataactgataatttgtattaaaaaagaataagtacccgtaataacctcttcatcacctccatatcctatgacccccgttaaaagcagaaagtaagataacaacataaaaatgatggaaatatagatgaatactttttcatttcttaatacatagttaccttttaaatttagacttgctgtttcttttatatttttaaaattaataattaaaaatactaaatcaatgatatttattgtgagcagtccgataaatatgacgaccaaagtatcatatatgtacgaaatattaacgtagacttccccgtaaatccccacatcctttaaatgaaatttatccgaaacgagataataattaaagatcagatataaaaatgtagaaaatttgacccaatctgtaagtctcggtcttccaaacttataccatgataaagtaaaagggaataatgaaaaaaagctgcttaaaaaagccataattaattcaaaaaaaatctctctatttttcactacatcatatagatatatagatctgattatgatgatcagaaaaataaatatatttaacagtataaaatttgttttacttaatttgaattttatcactttaggattgtaaaaatttattaatatttactattggcaacacgcttattagaaaaataagattttatattttcttttataaagatcatattttcatgcttagtataatttgaattaaataatcttagcaaattaaaaaacatatctacaaagacatacagaatatagctgctgaaatttcttctaaaatacaaatttttgcttctttgtactataactctttttgaattggcaattaccttattaaaactagcaccttctaaatgtataatcgaagtattattgtaaatataatttttatatttacgttttgaaattcttttttgcatatccgtctcttcgaaatacataaaaaagagaggactaaagccggaaaccgagtcaaaaagagtctttcttagcaacatatcggctcctgtaactttttcaatcatctgatattctttgctcgcatcaataataaattcagcatttttaaatttgaaataagaagaaaacattaaaagatattcgctgaaaggtgtcggaaaatatccaccagaatgcattatatgatgtttttcatcaatcaatttacagcctaagactcctatttttaatttattctcattttcataaaagaaatcacacattttttttatggaattttcaattaagatggtatctgaatttaataaaaaaagaagttttcctttagctttttcagcccccagattattggctctcccaaaccccaaattctcattagaataaatataacagatctcttttctgttttcaaaatattcttttgatccatctgaagatgcgttatccactaagataatttcatattctacttcctttgtttgagatataatagatgttatacagttctccgttatatctttcgtattataatttacaatgattatagagacttgcatatcaatttttactatttattttttctaaagtttgttggtctatctttttataaaaagtatccatattctgtttaataaaatctatattaaagtctattaagttgacattcattctagacgctatgagttcttctggaattctccatttaataaattttgcaggatttccacctacaattgaaaaaggtgccacatttttagtgacaacacttccggcagcaactattgctccttttccgattgtaactccagacattacaattacatttgtgccgatccaaacttcatcttctattactatttctcctcttgttgtggcatcctgcaaaggatttaattcatcaaaaatagttttcagcggaaaagtagtaaatgtgtctatctgatgatttcctcctaaaatgaaacatacattggaagcaatacttacaaaatttccaattaataatttttcatttggattttcaaaagactgagcatttatacttccataagaatatttgccaacttttattttatttaaatctgatatatttttacccaaagaggtataattatttttgttatttaatctccactggacagatttgatttgaaatgatatccaattaaaaaaatcaattcttaacttattaattaacttaagcaatattatcatatttgttgatttaattatattatttctttagattagaaaaaatacctttaagtgaaaaatatttcaaatctattatcttaatattttttagttgtaacattaaaaacataacgatggtaataattaattcaattattaaaaaactccaggcagtaccaatataaccgtattttttgcttaaaatataattgattgttaagccaacgacagctccaaatgctgtaattctaaaaaaaagattgtctaatctcatatttaccatgatctgaactcccattaaattagttaaagtcattaaaaatggtacaaatgaaactattctaagagcttcaatcgatggaataaatttggatccatacattaataatattaaatactttgaagttaaaaaaagtaaaatagatgcaaataatgtaatatagattattaatggaaaaaattttctcacttctaagatacctgattctttattttgagaaaatttatcactaatatgcggaaaaatagacgtaacaataggtatagttaaaaccattagcactaaattcatgaaattttgtgcaattgtaatataaccaatttcagttttagaagcaaaaaagcctaatacaataacattggtacctgagtataaagttattacaaaatttgacaaaaaaatcattttttctttccatataagctgaaatatatcttttataggttgtaatttcaactttatattaaaatttttaaatacaaaccaaaataaaaatatactacaaagaattgataaaactgtgcttacaacagaaacataaatataatcttcagccttttttatcaatataaaaattagaatagtatttagtaatcctttaataaaactaactacagaaattatttttaaattttgaaatccttgatatataaattggggagttaatacatttccaattaagcttccgaaaatgattaaggataaataaaaattttcatgaattttttcaaaatatatagaggatattaataaaataaaaaaagaaattataaataaaaaaaatcttgatataattacttgtgaaaaaattgtagatacaaattctttatcatgtaaatgacctactatccttctcgtagcagtcatatcaaatccataagcaatcaatatattgaaatacgctacaaaaagtgtaatataatttattataccataaccatcaggtccaattatccttgaaatataaggtacggtaataagcggaaatatataattaacagcttgtataattcctaaagatgctacatttctgactattttttttttataaaacattttaattatccttagaaatattggttaagataaaagtattaacaaattattatagttataaaaaactattaagatattattaagttttctataatcgtgcatcaacagaatctctatctaaaaatgctttcacatcaaataatatagaactatcagcttttaatgaagcaatattgagcaatttaaattcattatgtgaaactgccaaaacaacaacctcatattttttatccttgatgatattttcaagagtttcaatattatattcagatttcacttcttctttatctgcccatggatcataaacatccacattaataccatattgtttaagctcggaatagatgtttacaacttttgtatttctgatatccgggcaattttctttaaaagtaattcctaaaattaaagcatttgcatctttaacctgaatacctttttgaatcattaacttaacaacttttcctgcaataaattcaggcatcatatcgtttactcttctgccgcttaaaattacctgtggatgatagccaagctgtcctgctttatgagccaaataataaggatctacagaaatacagtgtcctcctactaacccgggacgatattttaaaaaattaaactttgtaccggcagcatctaaaacatcatgagtatctataccaattctgtcgaatattaatgctaactcgtttacaaaggaaatatttacatcccgctgagcattttcaattgcttttgaagcttctgcgaccttaatacttggcgctttatgggttcctgctttaattattagttgatacaaattatctatatcttcagcaatttccggtgtagaacctgaggtaacttttttaatcgtcactaaagtatttatcttatctccgggaacaattctttcaggtgaataacctacaaaaaaatcatcatttagtcttaatccagattctttttctaataccggaatacattcttcttctgtacatccaggatatacagtagattcataaatcacgatatcatctttcttaagaattcttcctaacatttcacttgcttttatcagcaaggtaaggtcgggagaattaaatcgatctattggtgtaggaacggttacgatatatacatttgcttctgagatttcttcaagagaataagaggggaaatatccttttttaaaattggtttcagaagctgttcgcaaaagttctttaatttcttgagaatcggcttctaacgtatggtcttcaccatttttcagttcttcaattctaagcttattaatatcaaaaccataaacaggtaagtgttttgaaaattccaaagctaaaggaagtccaacataaccctgaccgattacagcaattttataatttttatttgttttcatcatttttagtaaaaatactttttaccttatcgaaaaagtttctgtcatctgttgctgtatatccatatccatacttatttccataagcaaagtattctttatttacatcatttaatataaaagaaacattttttattttgtgtccttctacttgtttgttagcaaaatcgattagagatttttcagtatgtcttgatcttgttacgtacaaagtaacatctgccatatttgcaatcagtaaagtatctgttaccaacattaaaggtgcagtatctataatgatataatcatatgtaccctgaagatcggcaagaaggtcttcatatctgccattagacaataattctgtcgggtttggaggaatacttcccgagaagattacatccagataaggattaaaagcactctgatgtacaatatcttctacggaaacctgatcatcatataaaaactcggtaagtcctgccaaaccttttcttgctgtattatatctttgtaactgaggatttcttatatctgaaccaatgatgatgatcttcttcttcggagttgccatggttaaagcaagatttaccgatacgtgtgtcttaccttcacctttaaccgtagaggttacaaatacagttcttccttttttaatatttttaggaaacatgaaattcatgttggtgattaaaattctgaaagattctgccattggagaaagatcattcattttaaccaattcatcctgacctctttccatactaggaatttctcctatgattggttttcttttcgttaacttttcaagatcatgctttgtttttaccttatcattgaataactgttgaagataaataatagcgattggaatcaaaaagcctattaaaaatccggaaagtaaaattaccattcctctaggcgctactttcattcctacaaaagctttgtcaacaactcttgccttaggtgcagtaaccgccattgatatagctgtttcttctcttttctgtaataagagaagatataatgattcttttatctgctgctgtctttctatacttctaaagagtttttcctgaactggtactttagcaattttaccagagatactgttttgttcggatgataatccgcttttagctaattgaagtcctgttttatttttctgtaaactttgaataacagaatttctaatgttattgatttgttttgtaatatcaacaaccaaggggttttccggtgttgcactttgaagaagtttatttctttgcaataccaattgattatacgaagaaatattggtagttgcactaggattgtttaaacctagattacctggtaatgtctgataagaattctgattactcacataacctagcaaagcatctgtaagttcaagctgcgcattaatttccagctctttactttttgcttctgcatttgtttctaaacctaatttaacctctgtttctatatcggatatttggttactttgcttaaatctttccttttgattttcaacttcacccaaatctttgcccacctgctctattctttcactaataaatttagctgtatttctaaattctgtatttttatcttcaattgcatcctcattgtatacctgaactaatttattgatcatcgttttcgctttatcaacatctgcataattcatagcaagcttgataacagtagcatctttatttacaagcgatacatttaaaccggcttgataatcatcagttctggaatctatggtagaaatatctaatataatctcatctaatctcttatcttttttataattctcatttttaagaatcattatattagcaaaaggtagactaattactttattaaaggtagcattaattgtaggtaaactctcagaataaagttttagttgatttccgttaatttttaaatttacaagtcttgaaacttttccttttatatctttttcttgtaaaactctaacctttatcggcgatgcttcaccgtaaatttcatgtttcaaatctccgttgtaaatattggtttcaaggccaagactttttacaacttcgcgtacaagttttttagacttgaaaatttccatttcattttcaactccattactccctattttaccaataccggagatatcccttaaagcagcaaaatcctgtgttcctacattatttgattttgagtctttaataagtactgttgaagcgacttcaaaaattggaacttgtcttttaagatataagtatgcaagagctagtgatattataacactagcagcaagccaaatccaacgctttaaataaggttggattatatctctaacattaaattctgtatcaatttctgttgaattaatattttgttgttccatcatttttatttcttaaatagacctatcacaactgcaattgctgttacaccgatagaaattgcagataaaataagaggtgtattcggattctgttttgagattacatcttttgtattgttagcagatacaattatagcatcaccctgttttagattatagtaaggagaattaataagattggcatcctgcacatttactcttccatgagtaatttgtccattttcagttcttattatcaggatatcatctcttcttccataggtagtgagatctccagccattgctaaggcatttagaatagttgcctgtccgtttgttacaatataatcaccttgcctgtttacttcgcctaaaattgaaattttaaagttggtaagtcttacagataccgtaggattaataacaaattctttcattctgttacttaattcctccttgaactggactaaggttttgtttgttgtattgagttttcccaaaattggaaaatctatatctccatttgaatctacaatataagttggtcctgaaatagttgttgatccttgaccaggagtatttccacctgcaaatgtattattctgaacaaattctgaagatgagaaattttgattaaatggtttaacaacatctaaatctttagccgtaataagaataacaagctgatctcccgattgaattgtattttgagaatttttagcagaagcttctatggcaacattttctatattctgcatataattcagatcgttgtgtgcgttgggatttgttttgcacgaaactaatgtaactgccagtaatacagccagtattttacctttcatcatattttaaaattgtacaaatatacatttattatttttctatttatccagtatttcataaatagaattgttacttctaaattccggaacaatggttttcaaaattcttacaacctctactttatctcttttgatagcagctttggtaaccagattcaccatagattcaatttcagaaaataccatactcggatcttttgagatcataatcttttcgttatgagtcggcaatgtttttgcatcatcactcaaaagttcttcatataatttttctccgggtcttaaacctgtataaataattttaatatctatattaggctcaaatcctgataattttatcattcttctcgcgagatccaaaattttcacaggctctcccatgtcaaaaacgaaaatttccccgccatgtcccatggttccggcctgaagaacaagttcacaagcctccggaatcgtcataaaatatcttacaatatcaggatgcgtaatcgtaacgggacctcctgcttcaatctgctttttaaaatgtgggattaccgatccgttagatcctaaaacatttccgaatcttgttgtaataaatttggttttgtttccttccacattttgtaaagactgaacaaataattccgcagctctttttgaagcccccatcacgttggtaggatttacagctttatctgttgataccattacaaacctgttcacattatacttactggaaagtgttgcaatgatccttgaacctaatacattcactataataccttcgtgtggattttcttcaaccaatggcacgtgtttatatgccgcagcatgataaaccatagaaaaattataggtttgaaacaatggttctattctatgcttattggaaacatccgccaatacaaatttaaaggtgatatgaggaaatttttctctcatttcaagctctatatcatacagaggtgtttcagcctgatctaatacaacgataagagaaggattaaattgtgcaacctgtctgacaatttcgctcccaatagaacctgcacctccggttactaaaattgtcttgttaaaatgtctgcttcgcacatcttcactttcaattttaattggttttctgttcaacaaatcttcgatctgaagatttctgatggaacctccaagatcactgtctctaagtttctgaacggaaggagctttaaagatgttgaaatctttttccagaaataaatttacccaggaattcatttcatctttagacatcatttcttttataatgatgactccgtctactaaaagttcttctttcgaatgtttttcaattttttcctttgaaaggattggctttcctaacaacgatgctcttttagaatctgttctctgggttaaaaaacctacaacatgataaggaagacttggattgtctaaaatagctctcgcaatggcgatagactgctcatcgattcctaaaacaagaattctcttcttaagtgtacttcttctgtattctcttacgatatgaaaaaattcttttacatataatctgaaaagaaataatcccataaacgagatgatgaaatataaaataagataaggcgttaaaataaattttccgccggtgatccagaaataaaatatattaattgtcgctactgtaaccattgtacagaagcaggacgtcaaaagtttaaaaagatctgtaaaagtagaatgccttataattcctgcatatgttttaaaaacatacatgaataacgcgttgataacgataatagataaaaatacaagacttttatcatcatagataaattcacgctgggtaattttttctataatataggtagataaaaataacgatactaccagaataataatatcaattattaatattatccatctgggcaaatatcttacatcagagagactgacaacattatctcctccaaaaactttctttctaagagaatcgtacattgtctatatttgtgttcatgtatttcaaaatttaatatcgggcaaaaaacaaacccatttattttcgtgtaaaattacaataaaatttcatcgatttttgaattaataacaaatttaatttctgtaattatataatgttctggtaattctctctttacacttttctgtaatattacttcccgaaggaaggcacaaacctttatcaaaaaaagtaccagaaatattgtttccaaaaaaaacacactctttatataatggctgcaagtgcatcggtttccacaagtatctggtttctatattattctcagaaaatatatttctcaatttttctttattccaatgtaaatcatcaattaaaatcacatttaaccaataatttgaataaaatttttcagaaggctcagaaaataaattcacatcatcaaaatgattaaataaatcctcgtagaatatatggttttctcttctcgactgtattcttttttcaagaacctccatctgtcctcttcctattcctgcatgtatattgctgatccgataattatagcctacttcagaatgactgtaaaaatcctcattttcctttgcctgtgtggcaagataaagggctctgtctttagcagatttattctttgaaataagaatgcctcctccagaagtcgtaataattttatttccattgaaacttataatagataaatcgccaaaagttccacatgcctgattgttatatttacttcctaaagcttctgcactatcttcaatgagaggaatatcatattttcttgaaatttccagaatttcatccaccataaaaggcattccataaagacttactgcaataattgccttgggcttttttcctttcttcaaacaatattttacagcatcttccaatgcattagggcaaatattcaaagtagaaggttcactgtctacaagaaccggaatggcatttaaatatacaacaggatttacagatgccacaaaagtaaaagactggcagattacaaaatctcccttttccacatttaataatcgtaaagctaaatgaatggcagcagttccggatgaaagagcagttacacaggtattttctcccaaatattcttcgagatccttttcaaaaacatctatattgtttcccaactgagatatccagttggtatcgaatgcttcatgtatatatttcagctccgtccctcccatatgtggtggtgaaagccagattctttcttctttcaaaataaaacaattttatcatttatgcggctccaaaattatcaataattttctcatattcaaagcctctgcttattaaatatttgattgtttttgcttttctttgataatccttcaatccactctgcttatcatagtaatcctgataaattttacggatcgttttttcataatcatcctcatgaatttcatcaaaacatgtactgattaatttatcggaaatctgtttttgtttcagatgaattttaattttcgtctttccccaatgtttgatgtaaaacttacccctgatgtagcttcgcgtaaaccgttcttcattcagataattttctttcatcagataaagcataatttcttccttcgcttcatcaattaaaagaaattctctcattttctgctcaacttctgcatgacagcgatcctgatacacacaatagtttaccagtttcagtttaatctcatcaaaagtaaaagacttcttctccatatattttttacacaaaaaagaatgagcaaaagcccattcttcattatttattttcttaaaaattaatagttgaataaagctttaccttccattaattcatttactttttttcttaccgaagaaattacttcttcatttttgatgttatctaccacatcagaaattaatcctgcaatggtatccatatcattctccttcagacctcttgtcgtaatagcagcagttcctaatctgattcctgaagtggtgaatggtgatttatcatcaaaaggaaccatatttttgttacaggtaatatctgcaagaaccaaagctttctctgtttctttaccgtttacatttttatttctaagatctaccaacattaagtggttgtctgttccaccgcttacaatatcaaatcctctgtcgatcattgcttttgccaaagcctgtgcattagcctgaacctgcttcgcgtaagttaagaactgatcgtctaaagcttctccgaaagcaactgctttacccgcaataacgtgttccagcggacctccctgaattcccgggaaaacagctccgtccagaacctgactcatcatcttagtttctccttttggcgttttatgaccgtacgtattttcaaaatctttccccatcatgatcatccctcctcttggtcctctcagcgttttgtgagttgtcgtggtaacaatatgacagtgttcaaaaggattattcaaaagaccttttgccaccaaaccggcaggatgagcaatatctgcccaaagtgtagctccgatttcatcagcaacttctctgaattttgcataatccagatctcttgaatatgcagagaaaccggcaataagcattttaggtttttctcttaaagccacttctctcatctgatcgtaatcaataagacctgtttctttctgaactccgtaagaaaccacatcatactgaattcctgagaaattaaccgaagaaccgtgcgtaaggtgacctcccatggaaagatccatccccattattttatctcccggttttaaaactgccaagtaaactgccgcattcgcctgagatccggaatggggctgaacatttgcatactctacaccgaaaagctctttagctctgctgattgcaagagtttcaacctcgtctacgacttcacaacctccgtaatatctttttccgggatatccttcagcatatttattagtcaatacgcttcccatagctttcattacattatcagaaacaaagttttccgatgcaatcatctcaatgccatgagtttgtctttgtctttctttttcaatcaggtcgaaaataatgtccattttacttttagttttagaaatttttcatgccaaaagtacgaaattttcaccgagatttcagcatccggaataatgattttaaaactgatttttaactacagattactctatttttgttttaaatataaacttgccttcaccagaagaataagaacgggaacttctaccaaaggaccaataactcctacaaaagcctgcgcagaatgaattccgaaaacagcaatgcttactgcgatagccagttcgaaattatttccggtagctgtaaaagcaattgcaacattcttatcataaggaactttcatcattttattcatcagaaaactgataaaaaacataataataaagtaaataatcagcggaactgccactttcaccacatccatcggaagttccagaatttgatctcctttaagactgaacatcagcacaatcgtaaataataaagcatacaaagtaatcggagaaattaccggaataaatttcctgttgtaccagtcttttcctttaaatgaaataagaagatagcgagataaaaatccggccagaaacggaattccgagatagataagtacactttccgtgacttcacgcattggcacggaaatactgaaatttccaagacctaatttctcaggaagcacattaatgaaaagccacgcaaaaaaactgtaggaaaaaatctgaaaaacactgttcaatgccaccaaaagagcagcatattcgcgatttcctcttgcgagatcgttccagacaattaccatggcaatgcatcttgccaaaccaatcaggataagaccgatcatgtaatccggttcgtttttaagaaaaattaccgcaagaacaaacattaaaacaggtcccacaatccagtttaaaaacagagaaactgagattacttttttatctttaaaagcctgtagaaggagactgtaatctacttttgccaaaggaggatacatcatgagaattaatccgacagccaaaggaatatttgtagttcccgaagaaacagattgcgtaacctgggaaatttcaggaaaaaagtaacccaaagaaacgccgacaatcattgccagaaagatccagagcgttaaatatctgtctaaaaactttaatttaggattcatctacaatctatttgagaaaatacatataacatttctgaagcaatctccagacttcttttttcataaacctcagtttgttggggagtgttatccgaaactttaggatcttcgaaagtaagcggaactcttttttcggctccgggaataaacgggcaaccttcatcagcagaagaacaggtcattacagcggcaaaactacgttcaggattaaacggatcatcgtattttttggaaaaaccaatcaaaggcaatgtattctcatcaaattttatggcatatacaggatttttagtttcacttaatttccagacctcaaaacctgcatcagataaagtttctgcaattttcggaaacagttcggtaacttccgttcctcccgaataacattgtacattcgggatttcataataatgtgctgcaacctgtgcccaaatctgtgacaaatggcttctgcgcgaattatgtgtacagataaaattgaggcgcacctctttattctctcccgttttttgctgaatatagtcagtgagactttttaaaaccacttttcgctcttcgctgattttttgctgaagaactttttctaggtaaacagataatttcggattcatacagttactttaaattaacagcatcccgagttcggagcgcattgagatgttttatgaccaagctctttcagacttaatttttccttttcctgcggaattccacataaatcctgtgcaagacaggcagtctttttatttttaaggataaaatgttttccattaaattcaaggtcatacttaccaatcgttgtatcctgatattccacttcaatctctgaatttctaattcccagtttctcttccgaaagctgaataatatgaagaagtttccccggcttcagacgatgctcatcatcttctgcattccaaagctgaaaattaactttttcttcttttctgatggttccaccacaatcgataaaatttttgcttaccatccctatttctgttacatgaaaatgttccggtacaaaagttccgttttccaactgaaattcaacattatccaacgttgaaaggatatttttgatctgttcaagggtcatatttttctttttaattgtttaaaaattataattaatcatatattataatatcgcaatattacgataattgaatacaaaaaaattttaacagcatttttgctttttaacagtagaaattacttttgaaaaaaatacattcaacacctcaaatgcattctcatcaatacagtaacagatagaatttccttcaatatttcctttgatgagtccggcattttttaattccttcagatgttgggaaactgtaggctgtgccaaaggaagctcattgacaatatctccgcagatgcactcatttaccttcagcaaatattcaatgatagcgattctcgcaggatgccctaaagcttttgcaatggtagcaattctgttttgttcatctgtaaaaaaatctgtttttgtagctcccatattaaactatatcgcaatattacgataaataattttcattgacaatatttttaaaaaaaattctaaaaatctgaggagaattattaattataagagacttatttgatattctgaaagtcataaggctttgtaatgaaatcaacgaatgttaaatccatgacgaagaatttcatcttgtaatcgaattattttttgagaccaataaatgactctttccatcttatcaggaaaatctttttcagatgaattttgataaacactttgataattcttatacatttccaacctatccattaaatattcttcataatctttcagattttgcgggatatagcccggtccctcacagccacaagaatggaaaacttttccgattctgtaaaggctttcaacaattttccattctttagaagcgcttttctttggtgctttaaaatccagacctaaatctgccatcaaacttgaacattcaggacattttatcacgcggttttttatttctgaaattactttttctaactgatcttgatctttttttacaaaaattgacgagacatttcgaatattgaatccattaatcttatgaaaatttttatcttctctgatcctttctaaaatatcagaagaatgagtctgcttaaaagattttctacatttgaaacatacaaaatgagatttatatgtttttcctgcgtatctgcacatatacactggtttaattctaattcaaatatattactagttagccaaatcaacaagtaacaccatataaaaatatatgcgctttataataattcgttctcttaaacgcagatcatattttcaggagctttatcccgctatcctctcttactcctcgcgccctgcttcccggattagtgccctcacttttcccaatcccgctgcggggtaaccgtttctatcgcggctaggagatggaagacaatattgataattgatgaataattatatcctcgggtttctttacttttctctttttacttgtttctttttacttgttacttttctccttgttctttttacttttcccttgtttcttttcccttgtttctttcctttgataagggatagattaagaggagagaggagagttgtacgaaaaaaaagtctcatagaatttaatctatgagacttttaaataaaaactggcggcgacctactctcccgcttgtcgcagtaccatcggcgctggtgggcttaacttctgtgttcggaatgggaacannnnnnnnnnnnnnnnnnnnnnnnnnnnnnnnnnnnnnnnnnnnnnnnnnnnnnnnnnnnnnnnnnnnnnnnnnnnnnnnnnnnnnnnnnnnnnnnnnnntttagtaaatcagacgagctcttatcctttttttactgatataaagatagttacgcacagcgacagaactcgtcgtattaaaataaattgatgaaaattttcaaaatttttttgatgaaaattaaaaaaaatccgcctcagtttttgttctgagacggatataattattaagactacgtaatcgtttttcaagattagcctgaagtgttttttgttcgaagtcaagttcgaattatatataatcttctttattttgccaaaaatagcttcgtaaattaataatgaaaaatcggaagtccaaaatctaaattatgttgttagaatttttaatgttttttagattatttacttcttataattttgtaaaatgtcgatttactaccaatattgaaagctttcataatttcctctaccggaacttctttagtgttatacgaagctttaaccaaaggtgcaattttttgaaacttttctgttaacccctgttttcttcctccgactttccctcttgctcgtgcagatttcaagccggcatttgttcgctctatcaaaacatttctttcgtgttctgctaaaacacaaaatatttgaaaaatgagcttaccacttgctgaactggtatcaatattttcagataaagatttgaaatggattcctttttcgctcaattcgttcacaagctgaattaaaccaattgtacttcttccaagtctatccaatctccaaacaaccaaagtatcatcttttcgaataaattctaaaagtttagtaagattcggtttttctgattttacaccgctaattttatcttcaaatatttttgaaattcctactttctttaaagcttcaatttgtaactctaaattttgttcattggtgcttactcttgcatatcctacttccataattacactttactcattaataacaaatatagtgtaatttgttttcgtgtacaatgtaaatgtactaaaatgaaaacgaaaaagtcttgattattaaaaacaaaacctgtacactaatttgaacgattaaaatatgttctgttctaaaatttctactatagaacagatccaaaaattttctttttagttgatcaattattaaactttcattaaaatataaaaaataatatattgtatatattattttttttcattagattataccttttaaagagataatatctaaaaaatttcagttggttcattacaaatcagggattatagtgtaaatgattataataattcatttgaaaagtaataattttaagcttttttcatggcaataaatattagttttgacatcaatttacaaaaattaaaatcataactaacagataaaataatattcagttatttagcgtaattattttcttatctgttcaattaaatattctatcggataattaggcgttttcatcgatggactttgttttcgatcctcatactctgcaattttggagtataatttaaaacaaacaccatgaaaacaagtacagcaaaccaaaaattagttatcaaaaaaagagctgttaaaaattattctacaacaaaatcttttgacgaaacattgctaacaacaaatccaacctcgatctctattagctcttcgtttttttaagattacttttcattgctatgattttaatattgtctttttctacgaatcgatttaaaatacatttataatacaaaatattttaattataaacaatatattattttatatatttataaaagcacaaaattattacggagacattatcccgaaaaattaaaggaaatatataaaaataggaatttgcaaagtattgttttacaagtacatagaattttattttcccctattttttattaacatttattatttttattattatatataaaaatattaataaacattaatataattaagcaagtcaaaaaataaacaaagaaaagtcctgataaaggtagtttatagagatttttatttttattttacggagacattatccaaaaatacggagacattatccaaaaacacggagacattatccagaaatacggagacattatccaaaaatacggagacattatccagaaatacggagacattatccagaaattttttcaagtagtgaaaagacagcttttatatagtcttcccctttaattttgacatcaatttttcttttcaaatgtttggaaagttcattataaccttttacttcgtatagcttttttataatccttacctgcttttcatccaaagccctctgtttttttaggtattttaaagcacgctcaatctgaagctcgtctaatgtgggaaatttagagttaaaaccgacagcgtttttagtattatagatgacgatatggtaattcccatctttgtaagaataattgaaacttatatcattaaaattgtccaaatcagcctttactctgataaggaaatctctttcaaagcgataatgtccttcatacttactgataggaataaaaagctctttcagcaattgagtatattcctttacgacacctcccaatttgttaaacttcaccaaccacattaaaaatcgaagcgtattattagtagatgcattaaatgaaagatcttttttaatagagtaatactgcgacatattcagcaaatgttgtgtaactgccttatccatcttaaaataaatattttttttattccagctcggttccaaaataaaaggaacagctttatagccattaatagtctcatctttcagtctaagccaattaatatttgtcatattcaccagtgcttcctgaataacagaatttttcatctttctgccaggattgagatcttgtatggaaacagaaaaatcaattactccctgatgcgcccagccttcaaaataatcatcgaatgtaagctgcttgttagtcaacccttcggaaggagatttcgttccgataaacatagattgatcatcttttatcgcagataagatcattgtaataatcctctgttcgataatagaagtttcctgagaaataagaatttcgcgaaaatcgttggatatcaatacttttttcctaggtttagaagctagtgtttctctttttgcagatgattcgatttcttttttaggcatgatctgttgtttttagttgaataagatcttcgttaaaatctttattaattggttgatgaatggttacaaaatcataaaacttccatgttctaagtaataaatcagtaaaaaactgaatcgcttgcttatgattcgaaatcataaaaaaataatgctcttcctcggataatgtttccatgaaataagattgtggaaattctttattatcttcaagttcaaatttcaattcagattttctaaaaaattgagttaagacatttactttttttttctctgttttattttctatttcgatacaaatattattggcagattttctgatttcgataacagacgggataaaacttccgataatattaagattaaaataatttcctgccaaatcattatcatttcccaaaattatatttttgaaattattttcactaaaatatttccggataagtttggcttttctgaaacttagctcaccatttgtaatacaatactgaacggcttttatgttattcatctcatgaaaacttatcgcatcaaatacactttcaaaaatggataatgtctccgtgtcagacaatttatccgtgaaagtaaatcctacgccatttctggaatttctatcaaaccactttttattaaaaaattcattttcagcagtttgaattctattgattcctactatttttccgttaatatctctcaaataataggataaactttcggaagtagctgacgttttatacgtaaaaaaaatattcctgaatagttctgaatgtacgatttcaggtgataatttacgatattcaaaaaggtatttatcatgctgatctattttttggataatgtctccgtaaacttcatagtattgaactgattttgagatatttgatgataaataattcccattatgatttgtctttattgtaccttttgttcccagatattcctgcaattctttatttattgcttcagattctgcactttcactttgtaaaatcctttttttgataaactgaataagatctccgctatcattataaaccattgagtaatatatttttacacctgatttttcatgtcggaaaaagcggataatgtctccgtttttttcatcatttttaaagacataggctttcttatatttatcaaaatagtacaaatttcccatcttgaacaaaaaatattgttcaagatctatttcattttttattctgtcccaatcaaataaataagtcattaagaatctgctttagatcttcttcctctttgtttttcttcctcacggatatattgaggacgcggctgaatgtttttcccgtatttttctctcagcttcagaatactttcttccaatagatcccaatctttatagtacagactaccagatacgactttattgtaggtaacatcttttataaaatcataatgttgcccaggaatataaaccgtcgttgttgcatcgtatacttcatcagaatttctttttcgtcctcccttcttcgttttctcctgttcacggataaaatccggtctcgaaacaatatttttatgggaatccataaccatttccaatgcttcaacaattgcttctgactgattataaaaaatctgacgctcagaagttgctttatagaataccaagtcttttaaaaattccaacgaaatacgtttcataaatacggtgaacgttctttttccttgctcttcagtaagctttttagaatacgttcccgataaaccagatccggatctcgttagcacttctcgggcttctaaaatttccttttttacaggacgttttttgacaatgttttttgtttctgtcttttcttcaacagtaatcttactttcaggactttctgcaagaatttcttcttttggcttttccggattggttttaatattggttttggaaacttccttttccattttaatatctccggctaacttttttttctcttctttttctttgagtgtcttgaagtttttaaataaattagctttcatattttttaatttttgattttatttcttttactaaatccttatagtcttcagctgcacggctattcgtgtttacctgaaaaatgttcttgccttcttgttttgccttttcaatattcatatcctgtcgaataaaggtcttaaaaaaatagtcgctggcatctttctcctgtttaatcatttcgctgtatttcctgaaattcaccgtattggtaagaactctgttaaagaaaaatccaagaaactcaagattaggattatacttttctttaatattcaaaaaagaaggcaagagattatctataccagcaaatgaatattgctctgcttcaataggagacattacgtaatctgaggcacataaagccatctccccaagcgtaagttttttcatcaaaggtcgtggaggacaatcgattaaaacatagtcaaaaggcatctgctctaaaagattttccagattattcttcaatgtatctctggtataattttcttcctcttctaaaagagcatctccagctaaaacatatacgttagaactgccgtgatgtttgagtctaaaatctccggaattatccaaaaaattctttactgtataagggtaatcatcctcaataccatagcccatagacaggtttttctggctatcaaaatctatcaataatacatttactccctttttttgtgccaaagctgctccaacatgaattgccgttgttgttttgccaactcctcctttctgtgtaataatcgaaataaccgacataaataaaataattacattattcaaatttataaaacattttaaatatatacaatatttaaattttatacaatatattatttactatattttgtagcatataaatgatcgagcttaaattctttgagcaaactaaatactcctcgttttcaatctaagtttaatcctataatatttcaatattggcgataatatcaaaaaactttatcgaaagaaataaatgttttatcggacaaattaccatttccaccgatgaaccttgttttcggtgctgtgactccgcaattttggtgtagaaattaaaacaaaccaatcatgaaaacaattacatcaaaccaaaaattagttattaagaaaagagctgttaaaaattattctacaacaaaatcttttgacgaaacgttgttaacaacaaatccaacttcgatttctatcagttcttcatttttttaaaattatcaattatgtgggtaaattgcaaaatagtatcagaaaatcatcttattcattataaaataaaggagttcattgataaaactcatttccttactttgtctgaagagaaaaatccaaaagaagaagatcatatcatattttgggataatgattcgatgagtattgatacgccttatttaaaagattgtatggataagggctcgattgtcattgtaatatcatcaatcttccccaaaaatatcatatcaactttttttgaggaagatcaaagattaaaaatcggtgttcttacgaaaaatatgtattataatcaattcgtagaggaaatcagcagagtgatcgacaatttaaattcttaacagactaaatagttcgtctttcttattgagagcgattgtaatggacttaccattattaagttcaataacatttcctgaaacagattttatagaagtcagttttacaataaatgatctctgtactctgaagaaattaggggcaaccaagatatcttccatagattttagtgttgccaaagtggtatacgtctctgctgtcgttacaattttaagataatcgcccaaagcttcagcatacaaaatatcgtccagaattacttttaccagctttccgtttactttaatgaaaattcgctcaggcgaggagtcattttcagaaacaactgcttttgttttggggacaggggtctgtattctttcttttgctctgtttactgcttttaagaatctactgtaagctaccggttttaccagatagtcaaccactccattttcaaatccttccaatgcaaaatctctatgcgcagtgatgaatatgatggaaggagatttagtaagcgtacgtataagatcaatcccattaattttaggcatttcaatatcactaaaaacaatatctacttcgttggattgaagatatgccaatgcatcaatcgggtcttcataagaagcttgtaattccagaaaaggaatggtttttacaaaatctacgattaactctctgccaatcggctcatcgtctataactatacagcgtaatttatcattcatcctaagttaaatttatcgaaagggagacaaaaaaactgatttctctgtcttctatctttatttcatggtgatgcggatatataagttttaatctttttttgatattttttactccaattccgcctaaagttgtcgtttttttagaatctttttctttattattctctatggcaaagtaaaaaatattatttacaatatcgatatttattttcaaaaaattatcgtttttcgacttcagaccatatttaaatgcgttttctataaacgtaaaagttaataagggagcaatcattatattttcaacatcatcgggcatggtaatatccaatgtaatatctttgtctgcagaatatctcattctttccaaataaaaataatttcgtataaaatctatttctttttcaatcggaactttctctgtgttagattcatataaagtatatgccatcatatctgaaatattaataatcgcctccggagcactcggatctttcttcaccaccaacccataaagattgtttaatgtattgaaaaggaaatgaggattaagctgcgctttcaggaaatctttttcaatattaaggttctgaagttccaattcggaagtttgtttttggaaataaatcgttctattgaaaagtctggtaatatcaaataacattttaacgaaaaacggaggtgagaaagaatagattaccaacattgtatttcctaatacatttttataggataatgcctgcacataagtttgatttgcatttctgctgataagacctttcaaaggaccttctaaaatatctactccaaaataattaagaatattatactgaaaaaagttaaaagaaagccagatataaatcaaaccgggaatactgagaagaattaaaagcatgctccatgctctgcttttaaatattctgggaacggcaagatagaaaaatatgtaaaacacagccatattattcactgttccacgcatggtcatcagtaagctggacttaagtgtcatctgcagttctacccaaaaattcagaaagaacaatgagctaaagaaaatccacataaacgcatggcatagaattctggtttttggggtataaaatttctcaaaattaaactgagagattttctctaaaaaaggagtcattcctttggttaatgtctgcattattttgattgacttaaaattctactgtaatattttgctgcaaatgaataggtcataagttccaaagcgcgctgttcggaagaaaaccatcgattgatgctcatgtgtatataacttgaaaggatatctttacaaagttttatgtcttctaaatgtcgatctctttcattaaactcttctccaaactcacttcctgtacaaaactcatgtaaatcttcctttaaaactctgtattttgaattgatatgagatttcagttcagacgagaactcattaaaaaaaagattttccatggatttacaaaaatccaatttttcctgtaaagaaaggctaaaagatgaaagccaagaatctatgttttttacggccgaaaataatctcatattttcattttccgcaaaactttcatgcttcagtaaatttaagaccaacatactatcatgataaaaaatttcttccgccacttccataaaatcaggatgatatctttctatttctcgatgataggagtcgagctgtaaattccagatagtttcttcttgaaaatagggattcaaatacttatgtaattgctgaagcacttcggaatataatttctggtccttcagatgaagtcttaatctgatatggtaatgtggatctgtatatcgaataaaaaatatttttttaatataatttctattaatcaattcatccaaaatcggttttagacccaataataaattatctgacatattagaattacaatatatcttcatatacaaccactcactacccggcgcaaaacttcgttgtaatgatatttctttatattgagaccagctattgtatggctttgctcctttattttctaaaggaagaacaatctgttgattataatttttacctccttcattagataacaaccattctgaaaactgcagcatagtattgcttttcagttcatcaagcagtaggaaaagataagaatcattggtagtatccaaaaaaagttcgttatctccctgaaccagtacaatatgttttgaaacatcccatttttggaagaattcttttaatgccaacaaaggatcttttgattttttaatggtattaatatcgttttcatgcatgatccaacacgcccgatgcaatatgacatttttataatttattctgggaatgaatctttttttaatctttgaataattaatattcaaattgatattatcctgattttgggattgtacagcgcacaaaaatttataagcggcgctttcgcttttataaaaattatgagcatttgaaagccttggaataattcttttattaaggtttttagatcttaaaataatatcatctccttttattgatatcataatatcttttagcaaaatctgtttatcatgattattgctttctgcaaaaatcggaatttcatattctgaaaactgaggtcttctggttatatttgctgtgcgcttttcagggatataaatgatttctgcaaaaataatttcagaatatatttcctgttctttctgataaatttcatcgcaaaaatctttgattgtatcatccaacaaggcaaatcttcccaagatagaatttgcgccggttgttcctatattctgaagaaaaaaatgatccttaaatgggaaacctaccacacagaaattttgcatctttagtggtgtctcattcatccttaaaaaaccgttttccagatcaataactttatttttatctttttcaatcaaatccaaaataaaatctaaatctgaaccaaccgaatgtttatttgatgaatttttatctttcgcaagaccttctataagagaacttccccgaaaatttccaatttggggttctgcaggaaatccaattccaaattcggaatccaatacttcagtaaggggaacttctctcgagtcgtatttggtattaaagtgcttcttgaaaacatctaagtcgttctgcctcgaatttccggaacccaatgcatttaatatggaaatagctgtattgatattactaagcattttttcatccagctcaaaactgctctcagaagaatgcttaagatctatgtgaaagaaatgtcttttatcaattcctatttcacgagctaaatctttaatttctgaaatttcatatacaggaaggtgagcaagatccgtttcttctattatggcaatacaatgatctattttatttaatatttttaggtatactcccgcttcatacacttcatcactcaaaagtttttgtagaattttttttatattttctgtattctcagaagtaagagtgagttgtaattcgctaactaaaaacttaatatcaatgagttcatcaataaaatctgaaatctcattatcctcaaaatcgtcagaaaacaaacttttgatttcatcatatttcataaaatgagaaacttcggaaatacgtttcaaatattcattaatttccaatgatgacagctgatatctttcttcaccatctattcttattggctcctgataacgatattgctcgggaatcttatctaacgtattattaactttatatcttattttccttttaatactttcgtgagtctcgatccggaatttaatttccgcaagaaaatccatgtcgattcttgccttacgtaaaaatggttcagtcttttgagacttttttggatccttcaatgcaacgcctgccatagttccataaggagtacaccttgtactgcaccgaattgcatactttttgagagtatgaattaactttggaattttatcttctttaagcttattttctctgtagttgatgatagtattatataaatcaggtgaactccaataaattgatgtaacaaaagaatcgttctttataagttcttcaactacatcttctaaattgcgagttacatcgttatcaaacagtatctcataagaaaataatggttttcttatgagatacttatcataggttttatattttttcatgctacctgaagctattaccattagaatcaggcaaaaatattataaatatatctaatcagagagatatttgtaaaatcttacttatcaattaaatatttttcattgttctctttttattttttttaaactttgtaatatagtataaaccttattttgtacatttttctaagttcgtgatgacctctttttctccccaagcaggatagtttttatcggtaaccttaaaatcttcaaataattttttgtcttttgccagtttttcacataagtcagactcttttttacccataaagctgttcattttatcttcaaataaatgaattaaataataaggccttggatttgtcgggtttgcagaaattgctttctgataattagtaattacgcttttataatataattgtccgtttgtctgaggatcctgagctatttttgcataataataatatcctaaaactgtatacagctcagatttatctacagatggattgtcaagcagtttatctattcttacttttgcatctgctaataaagcatctttcttatccggactggtgtataaagactgttttacttccatgtaacttacatagtatgatggtaaccaataattggcatctaataattcaatccttttaatttcattaattgaattttgtaaatcgctttcatttttaatgcctttagctttttctaaagattttgcaagataactttctttatctgttgtctggttagatgcaaagctagattgagccatatagtttgattgtactaaaataatggctaatagagataatgtttttagtttcatatgattaattttttaattgtattgatatatttttattgtttcttatgtcaaaagaagagttctcaaaagaaggataaccagaaggattattagagatcccataaggttcagtaggaacagacattattttgttaagttccttattattatctaaatcctgataaatcgtaaccgaatattttccaggcggaagttgtgaaaaaataacttttttaatattatgatttaccttcattttctttaaggcagacttcataaagcttttttctgaattgaaaagtgctacataaaaaaatccttttttaagataagcattttcaatactaacagtaaggtttgctttgctttgcgcaaaactggtaaggcctattgataaagtaatcattaccaataattttttagaaatttgagacatcataagctgaatcgtttttaagtgatataaaaatacctatgtagaaaaatctttttcttgaggctacaataggttcgttattgaaaaatccatcattatttacctgctgtgcgtaacggtaggagaatatattctctcttcccagtacatttgataatgaagtatacaatatcacctttttacttagtaatatacttgcattggcatccagactattgtatactggtgttttggattgattaaatcctgaaagagcaggattattatatggtcttccgctagtaaatgtatgggttactccaaaataggttttaattggcaaaacaaaatattgtgcgttcagtcttatattatgttttgaggcaaaagatgggatagcaagttgagtaaaattactgtacaatcttttagaatcattataagaataagaagctgaatatttaagattttttatagatctgtcatctgcaaaatatacatcaaaacctttactatcgccataaccatctgaagtatagttattatctttccatagccataggttagaatattttttataataaaactctgtctttaaagtaattccgttattatcataactcaggcttgcaatatattgatccgcaacttcctgcgatagattattggcttttgctaaaatcgtattgcctggtaactggtaatatcttccatatattaatgaagactgaaattttttattaatataatctaaagatattcttgggtaaaaaacagtcgatttattataatcattatattctgccctcgctgaaatattggtataaaatcctttatgtaatcttagctgattatcagcaaaaagagctgagataaaataattgagtttttgatcctgaaactttgttccatttacataatattggttatcataatttctaataaaattttcaaaccctgttgtaattttataatattttgtaaaggtttttctgattctgaatttggaatgaatttcctgttgtccttcatcataccgatctccattcaattgagtgttgttatatttatcatctactctcgagaaggctactcctccaaaatattgccatccatttttaggttttgtctggtatgtagtattaaggtaatagttattttctgccaatccaaaatcacgagattgtaaagtattgatatcttcatattctcttacaaaatctgttcggttgtatccccagtatattttaagttgtgacttgtctttaaatacatttttgaactgaccttctccagaaaaattgccataatcttttttccaagtaaatcgatccggaaatagattattatacaatcccagattagtataatttagattaaaagatacggactgatgttctcctcctaaagttccgccaccgcctacacttaaaggagagaaattaatacccagctttgaagcttcggatatatctttcgtttccataggaagtatagatgataatgcttgtccgtattccaactcataacctcctaaagataaattaactcccttaaaaatgaatggtgaaaatcttccacgagacggagtatcctgagcatttgccgtatatggtgaaaatacatgcattccatcaatataggttcccaattcattactgtcgcctcctcgtatataaagctttccgtcttctcctactttctgggttccgggtaaagattgcaaagcaccgacaatatccccattagaacttccagtcattactacatcaagagcattcatttgttcaacccctctgctttttccgatgctgaatgaattggcagagattacaacttcatcaatagacttggctcctttatctaaaataattttgtctaagtttattattgatgtccctttattctctagatttattgttttattatcaaaacctgatgcgttaataactaatatcattttttcaggcatctgatctttttctactactattctaaattgtccctgatcattacttgtatctccaagaattgtattttccagatacacattggctcctgaaacaggactcttattggcgctcattaaaatacctgtaatctccgtctgggaatatatcattgaaaaaacaagtatcgaaatcagataaaataatttctttaacattttgtataaattttaattattaattcttattcatcctgattttacaaatacagtacgtgatctgaatctggtgtctcaagatgcgttgttggatactcgggttcctcaattgggtatactaatacatttagttccataattattactttgttatttattttatgagtcaaaaatatatgtgtacggtatgaaataaaatttttttcgatgaacttctatttttataagataaaaatcacaaattcaccgtttagtattttgagaaaatcagtaaaccccatactattaatcaataaaaatctcctcttatataagaggagatttttaagaatatagaaatgaaaaagttatattttaaaagatatttctgctttaaattcagagtgtaattatatatttaggcagcagatgaagacagttgcttttttcgtataacaaagaatacaattagccaaacaacaacagaaacagcaacagccagacttcggatatcttttcccaaatgatcagaaagttctgaagaaaaggctaaaatatttcctaccatatgaaaacaagctgcgaataaaatagattttgttctgtctgccattactccgatacctatactgcttaaatataagattccgaaaatgattaattcatttgggaaagacgtttttcccagaaatgttaaatgccaacaataccaaaatattgaaataataagatacttaaaaataggctttgtattaatgaactccgactgtaaataccctctccatcctctctcttccagaacagcatatgtcgcaatgtataggcctaataaaagaccttcagtatggctccctgtagtacttcccataactccgaataataatgtcggaagaagaaaaagcattaataaagttctccagttgaagaaacctttatatgtcatctcatttttaatatgacctttacctaatgacaatataataatcgctcctaaaaatggcccggtacctcccaacaaaccatacacatagtcactaaaattaaattttggtaattcaaaaggctgtaatctgaaaattacggaagtagaaagagcgataacaaaatagatcgcaattctcataaatttggagttcatcatagctttaattttttttaaacggctaataaaatttgttctctgtataatgcatacaagtcatacttctccatctcgtcattgcttaaataattcttttgagtggatgtttttaatacaaaatatactggtttaggaatttcaaaaaccttataattggatctgttgattaaaaaataactgtcttctaaagagaaaaatccaacagagtcattgattttataggatttttctgcatcatacaaatcttcacatcttttcgtctctgttttatctgccagaaacttatgaatatataaccaaccatcccactgcataggattttttcttacttcttcctcaagaattttatataaactctgcattgtattctgagcataatcttccattttattttcttttgaaggaacgacaggtacatgaaacgcccatttctgcttcatattatcatagtgagagataattggaacaatctttaatgataaggcgtgagataattttgctaatccttgttttaccataatatcttttcccataaaattcactttcagagaatgatcctgcttaaatgatccgccaaagccattatttccgtctacaaatgccaaaacagaatatccctgtctggtcttcatgaaaatatctaaggctaagtcttttttatctgccggtaatataacaatattggaagatgactgaaagagctttttaatattctcatactgattcagtacatctttgttctgcaatgcataagcacggggatccatcagaagaacaatatcaagatttttcttgatcagcaaagctaatattgcgcgataggaaccgatatggaaggatacaaatatagaaggagaagttgtttccagatcttctttataaaaatcatccacctgatccaacattgtataaaaatgagtatctataccttgaagtactctatagctcaaaagttctttatagtaatctttatgcttctgctcatcataagcttcattaaaaaaagtagaaatattagcagaaaaaagatgaaagttttttaaatcgtctgtaagccatttattctctacataattcgagatattaattttctctttttcaaaggcttgtaatcgcatgtttttcatactttgctgtatttagatggttgataagaagaggatatatattctctgtagggatcatgtgagattctctttttaacttaatgattttcagggtttcaaaataatttctatagtaattcatatcataatctgatatcattttatcattttcaccgtagataatcagagtatcaatagtaggatcgcagttgaggctgaattttttgtgctttaaaagatgttccagctgattacaaataatttcactatcttttactgaaatctttagattcgcatatttttgaagtcctaatagcggattttggttgatctcgttagcttcatgagaaatgacagataaagttttacaaaacaacatcaggctgtctttcgcaatggttttaagaatagaattaatctctacattgatcggattcaacttataagaagctcctataattacaagcgatttaatattttctatatccctatttacaatatgctgagcaagaaaaccgccataactgtacccaataagatgaacaggtttatggattgtactcaaaactgtttcgcatacatctgaagccacctcagaaaaagaagcatacttatgaaaatctgagttgtagccaggataatctacaaaaatcgtttcgtatttatccaatatctcctttgggaaatcgtttttccaaaaccgagtgtctgttcccataggattcaggaaaacaattgcctcgcggttgtcgctgttaaatacggttgttttcatttatttctttttaaaatattttacaaatgattttctgtagtttttggtaaacagatagatgactattatgcttaccagtcttgatagagcgtccattgcagtagctccggataattccatataaggaatatttatgataaactttattgttttagaaagagaaaggaaaataaatccgaaaattcccactaccatcaggataatataaactgctctcaggatagtgtatgaaatgataaacagctttttaaaattgaatttctctttctttctttctgcgaaaggatctgcttttacaaaaatttcttttacagttttgttagacttttccattaaatccggaatagaaagcaggtctgataagatccagtatccgtcgaatttgaggaaaggaattaagttcaacagcattatgactgtattagtaaacatcagattgtaggctacgacatttgcaaaggaatctgagtcggtaaaatgagccaacaaaaatagtccggaattcaaaatcatttgaatatacaatcctcccaggtttatttttattttttcttttttcccgaccctccatgcatctgttaaatctgtatacatcaccggcataatggtataaaatcctaaacctatccctctagggaaaatccctgtttttatggatgctgccgcatgtcctatttcatgtaaaaagatgatcatcatcagtcctatgtaataaattggcatatattctacatccattaaggaaattccttttgaaaaaatgtttagctgataaatccctgcaatattagccgataacagaattccgaatgccagatagaagagacgcccataaatagtagcaaaaggcttggagatctttgttgtccaataagcattgagtaattcaaactttaaccagtaatttgactgctgattctggggtttttcttcttttttctgttcaaaaaccgggataatctttttattaattacgttatttaaatcatccagagatatttcgggggcatttagattttgataaatttcattaatgttttttgaagtttgccccaaaagcaatattttatataataatgtttctattttaaaatatttatcctgataattaagcacatactcattttgggaaggtatatgtagctcgtagttaaaattcagtaatttgttttccatattgattttatttaaaaagggatgagtactttcaatctcatccctttttgatgaatgctattttatccccaagtccattctcctgccattgttcctggcacaggacctccggtatcacaagctgcttctatagcagctgccgtagtttcaaacctttcttctagttcttgtaaatttatttcttgtaaattcatgatactttaaaggttaactgttaatgttccgatttcgattgatggaccttctgctgctgcagtcgtttcaaatctttcttctaattcctgtaaattaagttcttgtgtattcatttgtttaaattttaaaggttaattgttaaatcatcgattttgattgatggaccttctgctgctgcagtcgtttcaaacctttcttctagttcttgtaaatttatttcttgtaaattcatgatactttaaaggttaactgttaatgttccgatttcgattgatggaccttctgctgctgcagtcgtttcaaatctttcttctaattcctgtaaattaagttcttgtgtattcatttgtttaaattttaaaggttaattgttaaatcatcgattttgattgatggaccttctgctgctgcagtcgtttcgaatctttcttctaattcctgtaaattaagttcttgtgtattcatgataataaattttaaaggttaattgttaaatcatcgattttaattgatggaccttctgctgctgcagtcgtttcaaatctttcttctaattcctgtaaattaagttcttgtgtattcatgataataaattttaaaggttaattgttaaatcaccgatttcgattgatggaccttctgctgccgctgtagtttcaaatctttcttctaattcctgtaaattaagttcttgtgtattcatgataataaattttaaaggttaattgttaaatcatcgattttaattgatggaccttctgctgccgctgtagtttcaaatctttcttctaattcctgtaaattaagttcttgtgtattcatgataataaattttaaaggttaattgttaaatcaccgatttcgattgatggaccttctgctgccgctgtagtttcaaatctttcttctaattcctgtaaattaagttcttgtgtattcatttgtttagattttaaaggttaattgttgaatcttcaattctgcagattgtattctttttatatttttttaaatcgtaagtgatcagtcctgaaaatcaatccggagttttgaagaattttatttataattaagctgtttgaagtaattcgttgtaaatcgattctgataatgaatctactgtaacaaagctgtcttcattgaaaatggaagcatctaagtcgaattctgcgatcagggaagatgttacttccaataccgcaagagaatcatcaaataatccaggagtatcatcagttccgaacaatagctgttgatcatcaatttcctctacactcatttttaagtttaatgattcaattaggatttcttttactttctgtgtaatttctgtcttattcataatatttgtatttaattgttattctttaattgttatattgtgagatgagtatgcttgacatatttccgccaaatccaaaagaattggagataacatttttaattttctgattagttcttttttccgttataaagtctattttttgagaatccggcatcgtaacatcgtcgtatttaccgtatatttcgctgtttttaatacttaagatgcttatcaatgcctcaaggcttccggcggctcccaatgtatgtcctgtcatagactttgtagatcctacaaaagttttatttttcttgtctttcaaaagactttcgcaagccagcaactctgatgaatcatttttcagcgtaccggttccgtgtgcattgatgtaatctaaatcttctacatcaaccccaccgtactctaaagttttttgcatgcatttcagtgcgtaaataccttccggatgtggcgctgtaggatgatacgcttcattaagaatgtgatatcctttaatttctgcataaattctggcatttcttgcaatggcagattcaagactttctaagatcagcatcgtagaggcatcacctaaagacattccgtttttcttatcactgaaaggattacattttgttttagaaattgccatcaaagaattgaatcctgtataggtaagctctgtaaaaatgtccattcctccgcagatcattacttccgttttaccgctttcgataagatcaaaagcccttccgatagaattagttcctgatgcacacgctgttgaaatggcagataccggtcctgtaattttatattctttggcaatatttcctataacttttggtgaagaatacaatgccagtttataatcatgaatgtcttcttctatcgattttttcattcttttgataatcgcatagcttgctcctaccgatgttcccaaacatagtcctgatttttttttctgaagatcttcgaccgatatattggctgtttccaatgcttcgttgattgatattttcgcaagttccaccataagcgaaacatcttttttctgtgattcttcaaacagatcctgatccataataaaacctctgttattatgcagtgacttgctgtctgtcgagaacctatctgatggaattgtctgataattaacgtttccctgtttcaaattctgctcggtttccttaacattatttcctaatgatgatatagaaccgaaacctgttactactactctatgtttcattttaccttaatttttacattaatatttatcctataccgccatctaggacgatttcttggttgattaagaattccggagcttccaaagccaggtaagaaattagattcgacatttcttccacgcgtcccattctcttcaaaagagtactgcttagacgctggtttacataatcgtccgaaatattttccgtcatatccgtttctatgaaacttggcgctacacagttgaccacgattcctaatccgcccaattctttattaattgattttgaaaaattcgtaatcgcagcttttgatgcagcatacgcagattgtcccggatttcctttgattcctgatactgaagtgatattgataatctttcccttcttatttttaatcataaaaggaaggagttttttggttggtacaatcacacagtttacattgttgtgcattacttcccaccactcgtcgtaggttgttaacagaaagggtttaggttttttgctgtttctgctgtctcttacgcctgcattattgattaaaacatccaggtttttgaaaaattctttatgaaggcttaccaattcagagatctgctgcacatttgatgtatcacaacgtactgcggttacggttccgttagtattctgaagtgtaagttgctctaccaaatcattagcactttgctctgaacttaagtatgtgaagactacattatgccctaatctgtaaaattttgttacaaggtctttcccgattcctttggcacctccggtaattaatatatttttcatatttatgcttgttttaataaaaattgagaacttcctcctccttcatgcactgcgcttacaaaagccagatctacttttttggagatttccttttcaggaatataattatttgatagtatctgacttgcaatacttaatcccattacagcactcgcagatttcatatctcctgtatattttttgtgaacaaaagtgtacacatcatttttagcactgatatttctcagtaatgtttcctcgttatcgatatgctgagtatcattggcaaaaccgcttaggaaagcaatagtttgatcctgataattgtcactcagcaattctgctgctctttcagttacaaaagaagatctaattgtagtggcttctacgttattataatcgaagacatagttttcattaagaatttctgcatacggttttttgcctctttgtcggatgcttttttcagattccaatacaatgaatgctgctccttctcctaatacagatcttttagaatcatttttatgattgtcgagagataaatttccttcttcctgttcgctcaaaattctgaaagatgaataatgatccactccgccgcagatgacaatgtctgcaactccttttttgatcaaatcaaatccatatgatacactgctttcattaaagatcaatgaacttggtcctttaaggctgaatgctctcgaaacatctcccaatactgtattggcaacagtttttgtgaattttattgggcttacttttgcaattccttttaagaaaagatcgtataaataatcttctactgattcggttgctccaagagaagtttctatgattaaccctatatcattgtttgattctgctttgattccggcatcttcaagcgcttttttgcaggctaaaatgcccagttttgaatatttctttggagaaaatctgtccatccagtctacttcttcttcaaaattgatgtctgcagcttcgccaaaaaattgcggtttaattttatcgttatcccaattttcttttttggataattctttttgattctttagattttcccatgtctcttctgctccataaccaagcgcagacagtgatcctaatccagtgataaaaacttttgtattttccatattccttaatttttaatttgttactgtgagatctgctttacagatgagcttttcttcaacaaaaatttctgcatgaaaatttttgaagttcataatggtatttagttttttaactttaattgttaatgtatcgttaggttttgcttctttgataaatgtggcactttttattcctactgctttcccgatgcgtggtttggaacctactgtgccgttagaacttgaaaatcggtctaatattccgcaagactgatacatcatttctatcagaatcactcctggcagcaaaggatatccatcaaagtggcctttaaagaaaatcatatcttcatccaggaatactttagttataatggcttggtcttctataatttcctccacgctgtcaatcagaagcattggttttctatggggaagtagttcttctattttaagagcagttgtagcggtcatagtttttttatttttagtttttcaatattttctgatgcaacagagaacataatattgtttgttttatatttagcaatgttgacaggcattgttttccatactctgtttttgagaatctgatacatattcatattatcatggtactttaccagactttctattgttgtccagattttgtaaaactttagatgattattaattttctcttctgttagctgtgataaaagatttcttttatcagcatctacagcactatctatcaattcaatatctaatccttttttatttcgtcccaaataacaggctataatatttttggaatatgacatggaaacatagtatgtgttatttttgaataacatttttccgtttttagcatagtaaatatttctaagctctatcggatctatgttttttcttttgcagatctcaatcagaatcgcttttgagatatattgtcttgtttttaatctcagattggttcctgcttcgattctgctgataatttcttccgagaaataatttttaacctgattaatggtctgcaaagtaacttccgtagagagttgggtataatagatagtctccgcctgtttatttgtaatagagatttccatcatacttaataaattggatgttgtaatcttttctgttctctattccatatttatgttttagagaatcaatcacaggagtttcttccatacttcctctgtaaaatacatcgatattcattttggttttcttctgtatttttactttaattacattatcgctttcgtagatctcttcattcagatcatagaaccacacaggcttcccttcggacacaaaatactggtcggatctccccagaatgatgatttcaccattctccattttcattcctaaatctttggtttttattttcttctgagattgcggactctggattttgtttcctttgatatagcccagatagatcgacggactttcaatatttaataatcctattttttcattattgaatattttattgtatctggctgtagctttaatttctacttcgacactcggattaggttttcctatagttatagtattataatcctctccttttttaaagaaattggtggatactcttggtcctgcttcagcaagtccataggtagagtatatgttacaattaaagagatttgtaatttttttgatgatgcttttgtacggtttatctcccccaattgctataaaattgagattattcgacttcggcttgcatttcagattgtaatataccaccagtcttgccagtaaaggcgtgagataaatattggtaatattatgtttattcaacaggaaagggatctggagtattccgatgttttttgttgcgaaaacgatgcttgccccaacatataaatgtgaaaaaaactgagcgattaatccataagaataagaaaccggaagtacgattaatgttttttcttctcccgtcagtttcagagcttctacattagatgcaatgtttctcattgtttcatttttccccaacagaatctttttcggaattttagctgttgttcctgagctcgataccaccaacagactgttttcatttcctataaaattttcaggacattctttataatgaagtgtataattaagaaagtctgtcttttggaaatcttcaagagatggactgcctgaatcttcagaaataattgcagagaattttaaatcttttattttttctattcctccgctttctacgataaaaggaataagatcagcgtgaatacatcccaataacaacatcatcgatttcagctggctcttgatgccgtagatgataacaacactttttttagggatagaaagagtatctatttcagcagatattttctcgatttccgtgtaaaactcattgtaagtaaattttaatagcggagattcttctatcgttgcgttgggatattttttaaaagattctatcaatgcaaacatggtttccttagtttttagattatagtgataatactttctgagttattcttcttaggttttcgtcttttagattgcttacgtttctgtttaaaaaatctgtatcctgatcaatatgtttttcgaaagcaacgttggtcagctttttttctacagatactctgaaaagtcttgcttcataacagttttcattaagacttaaggcattattgatatattttgcataagaattgatatattcaattttctgcatattgttttttgcttccttcgccagcattgcacagcaaaaagcttggtatgataattttacatcctgctggtcatttcccaacgatttagtttttttgataagcgttgcaaccggatgctgctcttcaatgacatttaataatacttctgataattccatttctttattttgttgttagttttttatcgctatttattttgttaaaaaatttcttttttaaaacttgttcactttagtagcgtttattgttttttgtaatttgatatgtcaaaagtatatcgatctgaaccggaaagaaatttttttcgatgacattgcttttttccatgatgaaaatctgaaatcatccgataataagaaacccttctcgttaagaagggctttttgatcgataaagcagtttttactctgaaatgacagataaaatatcactctaagataatgtttagaattgtgctaattcctaataggagaaatgatttcattactgaaaggctaaaattttaagatctatacataataggatgagtgtgaaaattgatcgacttaacataatgtagattgtttccatcttaatcttcttttaaattttcagttaatattttaatatgtcaagtattgggttcaagccaaaaatgggacaaaatgttcactttagaaatacttccataactaaataagccgattctaattaaaaatcggcttaaaatagtagttttagctatacagatcaatacatcagcgtaattcccgcaccccatcccatatcactatcataatgggtacgaatgcctacatttttattgataatatattttagttctgtcatatattccatatcggtatttaccataaaacctgccctcaatctttttgtaataggaatgtcctcacgcattaaagaaagccgtacaataccatcatgatagacttctgcttgaaaattaaccaacattggcaatgtgtacataaatcccaagctaatggctctacgtgtatctttctcgtttttctgtccgaataaattggtttcgtgctcatccatacccattttacgatacctccagtcaaaaccgatgaatggcataaaccattgcattttaccaatgtatcgtcctaagtgagtttctacttcataaccgtgcatatcattatagcctaaacgccattctgtacctaaactccatcttgcattctgaagcattgcatcaccatcatttccattggtagcgaaatcgttttgagccataaagtgtggcatattactctctctccgcaacatattatatgattgttttttgtcaggtaaattcggattttgataatcatccactgcaaaaaccctgttcattcccgacatcatatgataaaggatatgacagtggaaaaaccaatctccttcttcgttcgctaaaaactcaatcgtatcagtttccattggcattatatccaaaacatttttaagaggggatttttcgcctttcccattaataactctgaaatcatatccgtgtaagtgcattgggtggcgcatcattgagttattgtgaatagtaattcgtagaatttctccttttttcacaggtattttatcggtttctgaaagtattttattatccatactccacacatagcgattcatatttccagtaagggtaaatttcaattccttcaccggagtatctttgggaagcgaggtattgtaaggagattgcaacattgcgtaattcagggttttaatatcccctaaagcgtttgcattgtagcgattgggatcattatccatattcatattgtgttggctatgatcttgcttttgctttccatctccggtaatttcaggatacattactacgttcatatccatttgattcaagctcattttcattcccatatcatccagatcgccattcatcttcatcatatcgttcatcattttcattccctcaaaatatttcaatttgggaagtggggaaatcaattgcttaataccgttgcccacaaaatagcttgccgattgtgttctgtcttcggtagtagctaaaaattcataagctacaccatcagccggaatggtgacaactacatcgtaggtttcagaaactgcaataattaatctatcaacttctacgggctctacatcgttgccatcattggctactacagtaattttaccacctgcataacgcagccaaaaatacgatgaagcaccaccgtttgacacacgtaaacgcactttgtcacccgcttttagagttttgccgtcaacggtttttaaattggcagtattatttccgttgattaaaattttgtcataatatacatcgctgacgtccattgccagcatccgtttccattcgttggttacttttgttttgaaatgaccttccttaattgcttctgcgtaagactgtgttgcgttttttttaatagctgcccaatcattagcgttatgcaacatccggttgatgttatcgggattaagatttgtccattcgctcaatatgatgggtacggttggtaaatcatctataccttttctaaaggttttatcatcattttttttcttcattataaaactgccatacatcccaatttgctcctgcaagcccgaatgtgagtgataccagtgtgttccgtgttgtattatagggaaacgataggtataggttgtgcctgccttaatgggcttttgcgtaagccagggcactccatcttccttattgggtaaaaacactccatgccaatgcagtgaggtactttcttttaattggttgtgtactataatctcggctgtatcgccttctgtgaaagtgagtgtaggcattggtatctgcccatttacggctatggctcttttttctttgcctgcatagtttacgagggtatcttttacatacagctcatatcgcactattttttgtgcgaaaagggattgcgaatataacagtataaaaaatatatacaacaaccttattctgatatttttgggtataaccatttttactatttttttaatgaaacttatcgctgatcttttagccaattggttaatattttaatttgctcatctttcagctttgcatttttgtgcatcatggtgtatgatgataaaggcatttgcttagtctcgatttgttctttaattgagtttaataatctttcctgtttccgatttgagtatgaaccccattcattgaagtttaactctttttttgcatcttcgatgtgattttctaccattgttcttgcaggctgtacatgatcataccacatgtagttggtattgttgctatggcaatcgtaacaagaggtatgcagaattgtttttacttcaacaggcattttatagacttgggaaaaatcggttgtataaacctgccctttatcaacattgagggcaggctgataaaattgtatcgcaataaaaataaacagcactaatgctaaaattatctttaatactttcttcattttacaactccttttttaaagaaccacaggtaagcattttactgccataataaggatttttgatagccttagcttcactgatccaaacagcacctttgccatcattgtacatcgggcaatagtcctgatataatttttgggtagttccgaacagtgcaataaggtctgaaacatctttacttagtgatgctaaatgttctctttggtggtctatttttccggcattgtcgccaatatgttcggcattttcttttgcattttccgctatctccatatattgtttatgcttgtttgcaggtatggctttcatatctacatttttcaaggtgctaaacaactttttgcctgcgttggctgcagctttatcattatctgcaaccagtgcattttttaaagccaaataatctttaacaatgggtgcgattgagaaattttgcgctattactttttcttccggttggtcagctttttttgctgtggtatcatttgatacaacggtgcttacagtgccattttgagttgatgatggcacattttgagtttcagctattgatgtcgtatccttagctggttggtcgctgtttttattggaagtctgattgcaggaaactgtaattgtaagaactgctgctaatgcgatgattgagaaaaatatatttttcattttaatgctatttaatgttgttaaagaaattttagtgacttatttgttttgaaattctttcagctttcgcttcataaattctatttcctttgcctgtgtttcgagtatatttttttgtaattctataagttcggggtctgtaagctttgccttttcggacatcaatacggctgctgcgtggtgtggtatcattccttttacaaattctttatcgcccacattgatttgttccctaatgccaaaccaagagaaaatcccaattgctaaggaaaatgtaatgattgcccaattgatttttttgttttgatacattcctttcattatcaataattcaataatcaacattgccgaaaccatcagcagggtcatatataaattattgatgttcgggataagattgttcaacccgtcaatcatagcatacataatgaaatacattgctgcgaacattgctacagccattacagcaaaccgtttgtacattgctaaagaatgtttagcgttatgcccttcacttgcggtgtggtgttgtatatcgtgtttgttttctgtattttccataacggtgtaattttatttactgttaattgtttcttgaacactaccacaggtaagcatttgagaaccataatatggatttttaaccgcttcttctttgctcaaccaattagcacctttgccattgttatacattgggcaatgcagataataaacagctttttcttgttttgaaaccttagttaattcatacatattttttgaaagcaaagcgaaagtttctctttgtttagcagcatctttggaaatagcaattttttcggcattaaccgttaagtctttcattactttcatccaaacggtatgctcttcagtagaaagctttgtcatttccactcctttgatggcttttaccaattcattagcttttgcagaagaagtaactgcatccgtttttactaaggcatcttttactgaaaaatagttctcgaaaacggctttcagttgcggtgcatttggagtttcggcagcatttgctttagccatttcgttgtggttatggtttgcgtgttcgtttttcatatccatccctgtatcattagattttgctactggctttaattctctgttgtactggcaacatccggataattttgcatatgcatcatccggggctaaaaatttctcactgtcataaccagctaaagcaatacgtttcagtatttcatcctgatttgtttttttatcatcatagctgagtgtagccattttggtgtctttattccattctacaatagctacattttttacgtttcctgctttttctatgtttgttttacacatttcacagttgccatatatttttacgctttctgtttttgcatttttgatttgtgcaaaactgtttacagctgatagtaatacggtgactaccatcaatatttttgatattgatttcattttgaaaatttttaatttaataagatatacgaaagggttgcgaaaacaggatttagttttcgacaagacataataatggctgacaagccatcattttagcctattttaggaggttgccaaatggatgagtatcccgaagagtaataggcttgtttgaaaccgaatttttgctttttaatttcagcaaaatggtttgtagtttttaaatctattggtattggtaggcttaaagaagatgaagaagtgctgcatctgcaggaactgtgcttgcacttaccattacaatcattatggtctttatcttttttgcaggattttgttttacaacaatcttttttttctgcttttgtagattggttttttgaacaggatttttgctctttttttatttcttccttcgtacaagcaaatcctatatttggtattagaaaaaatgccaaacataataaaatgatgaaactaatatgtttactgaaggttttcaatactgcaaagttacgatatattttgtgatcaaaatatttttattaatgttttaatacgaaaattatgactgtttttgaaactaatttttcatgtacttctttactttctgtactgtattctttgagcagtccgttaatttagctatttcaattatagttggaggattttttttgttcaaataattaacaacaccagaatattttgataaaaactgttctgctgattctgttgtgttttttaatctccctttataggttcctttagcttttgcaatggcaattccctctttttgtctttccaataaagaatttctttccatctcactgatattagctaaaacacttataattaatttaaatgttggattttctctgccccctatccaactttccaatcctaaattatctacccttaaacaaattttattctgatgtaatttttcaatagttggcttcaaaccaaaaatgggacaaaatttacactttgaggtttaattagttgatttatatattattgcgaaggaagaaaataatccagaaaagaaactccctttcagaaaatgaaagggttcactttagattaaataatatgaatgtttccagaactaaataagccgattcttattaagaatcggctctttaaatataaaatttcaatttatttacaacatacatttcccaactggattggtgggcattttacagcaccataactacaatacacgcaacagtcgccttttaatgcctttaatattgtcttacaattttcacattcataaaagtattggcaagcatctgttggcattgtttcctctttttgggatccgcagtttggacaagttatagttgattgtaatttaatttccattatgatataattttgctttttagtgatttataaccagtcgaattgatagctttttcgatttctgcaatacttgtttgtttgttatcaaacttaacaatggcattgcctttctcataagaaaccacaacttccacaattccttttagtttcataacttctgttttaacgtgatgttcgcaacctgaacaggtcattcctttaattgtaaattcaactttctgaattttggaggtttgggtaatagctgctttactttcagtctttgggaaaaagatgtgagcataaagcggaaatgataaaagtaaagccgccataacggtaataattcctaaaaatgattttgtttgcataaaattagatttttcagttatttcacagtcacagtcaattttcttttgcggtttcaacttttgaaaccaagcaaaaccaagcactaaaattgtcaagctaagaaaatatggtcggaaaggttctagccaagaaaaagttgaagcaaccccacttgtccctgctattagagctaaaacaggtgtaatgcaacataatgaagctgcaattgctgtcaaaagtccagtgccgattagtctgttgtccgttttcatattgtttctaaaattttattatcatcaagtatttcaaaaaatggggtcaacattttttcatactctattgtcaatgagtaaaaaatagtttgtgcttttctttccgtttcaattagtttacggtctttgagttttcgcaaatgctgagaaattgctggaatggtcattcctaaaatatcagccaaatcacaaacacacagccgtttttcttcaaaaaataaaaaaagaatttttagtcttactttattaccaacaagatcaagtccatttgatagttgatcaaaagaagtatttaattctgaaaccctttctttgcaacgaactatttgttgagcatctgcctgttgcctgatacatgtaatatccatcttacaaatatagaatatatttgttatttaagcaattgcttaaataacaaatgcttttattttatttttgactttttgaaccgtatttttggagcaatcagttagttttgcaatctcaataatagttggtggattttttctctttaaataattaatgacagttgggtatttagctaaaaactcctctgtagattctgctgtatccttcaatctccctttataagttccattgatttttgcaatttggattccttctctttgccgttccagtatggaattcctttccatttcgccgatatttgctaaaacacttattatcaatttaaatgtaggattctctttcccttccaccaaactttccaagcctaagttgtctacttttaaacaaatattacttttgtgcagtttctcaattgtctgtaaaacatcaagcgtgtttcttcctagtctatctatactagaaacgctaatatagtggatttcactttttccaatgtcattgagaagttcctttgcagaaggtctctgattaaatggaattgagccacttattttatcgatataaattttttcagcagaatactgtctttctagctgtctttcaattttttgatttaaggttgataccctgatatatcttgctttcatttttatatttattataaataaaatttcccaattttaggatgggtatttttgggataaaatcatttcagttaaattgtatggctacactctgattttcatcccaatgttaaactatagtctaattttgggatttacaaatttataatatatttatattcacaaaatatttctgatgcctagaataaatcttttaaaagataaagatgttgagcttttcgataatcccgctgaattaacaatcgatgaaaaaaaagtattgtttacattagagtttgacaacaatcttgaacctaatttaaggaaagacattacgattgtcggatatattctccaaaaaggttattttttagctcaaaaaaaattttttgtaccaagccagtttagagaagaagatataaattatgtttcaaaattatgtggattagaatataagatagacattacagaatataaaagatctttatatactcagcatagattttttattttaaataaattcggatatcgtgctttctctgattgtatcactttatttgaaaaagaagctttagaattagttaaaactccgcaaagaccaaaagaaattttttattctctaatttcatttttagaagaaaaaaaaattgaacagcctaaacattatatttttgcccagaccatatccaaatctttaaatgtatttgaacaaaacttagttaacctggtcgataaaaatcttagtataactcaaaaaaaattattggatgaaatgatgaaccttccttccaacaatgacgaagtaacttctaagaatccctatttaataactaaattaaaaaaggttattcaaacaataactccgagaaaaattaaacagagtattgatgatttcaatattatccgggatatccattttcatctttctaatattactaaattaaatgagatttcaggtatattaaattattatgctgtttgggtactaaaagcagagcatatacagtttgacagtattagagatattgaaagaaaaagactttacatagtatcatttattatttatcagtatcgaatccgtcaggatgcattcgttgacatctttcttcaggttgttcaaaaatattataataatgccaataagtctattgcaaacgactttttaaagaaagacttaaaacctaataaacaaaaacaactggcaaaaattaggaatattattttttcttcgaaaaaacaattagaaaaggtaaagcaaataatcttcactaatcagtatgtagattctcaaaaactcagtttaataaaagatattttcacttctgaaaatcattctttacatgatgatattattcaggaaattgataaacttgaaaatttaggaactgctgcattgaaagaagaattattctttaaggagctgaataatggatatagaaaaattcataatagagttgccggaatactattaatgcttgagttcaatactgaaatgtctgattccaatatgatatctgttattaaaaattatcaagctaaaaatggaaaaataacccatacggcacctcgtgattttattcctaaaaatgaacagaaatggttattcactgagaatggcgaatttaatccgcagatgtataaaatatttttgttccgagaggctgctaatcatataaaaggtggtacgcttaatcttagattttctgataagtataaatcaattgatgattatttaattggatacaaccgatggaatttggaaaaaaaagaattgattgaaagagcgaatattaatcatatgtatgaaatgaaagatgctctgctacttctaaaagaaaatttggttgagcattataaaaaaaccaacgaaaatattctaacgaacgaatacctaaagtttgggaaagataataaaccaagagtaaccactccaaaattgaccgaagtaacaagtcattttgttcatgaggctattggagaaaatgtttatattcctcttacaaaaatattatcagacataaattattcgacagattttacttcctcttttctacactacagtcgaaaatcaagtaaagattctcctgcaggaaatattatttatgcagcagttatagctttaggatgcaatattggtgtaaggaaaatgtgtaaaatatctacaggtatcggagctgataaattagaatatgtagtaagatggttttttagtagggataatattgatgaagcgaatcaaatgattttagaaattacggacaaactttcactacccaaaatataccttcagaaaaaagattcattacacacttcaagtgatggacaaaaatttaacgtaactgttccttcaatcaatgcaactcattcttttaaatattttggaaccggaaaaggtatttccgcttatagttttattgatgaaaaaagtaagcttttttataacagtgtaattagtgcttctgaaagagaagctggatatatacttgatggacttcttcataacaaagatatagatagtgacatgcattctacagacactcatggatatagtgaaatcatatttggggtatgcaattctttaggaattttatttgctccaagaataaaaaattacaatgatcaacttttatacacatttaaagattttccaagaaatacttatgaaagcaaaggttataaaattcttccttcaaaaagtatgtatatagatgagagcatcattaaagagcaatgggaaaatatattgagattattatgttcaattaagttgggagaagttaaggcttctattattttgaaacgattaagctcttattcaaagcaacatcctttatataaagcaatgaaagaaattggtagaattcataaaactttatttttattacggtattttgatgaaccttctttaagacaaaacattgaaaaacaattgaataaaattgaactatcacatctttttgctaaagctgttttttttggcaacaatcaggaatttaaatatgagacaaaagaagagcaagaaattgctgtagcatgcaggcacttaattcaaaatgcaattatcttatggaactatctttttatctcaaataaactttccgaaattgagcagaaggagaaaatacaagagaatatagaattaatgaaaaatagctctataatgacctggcagcatgttaatatgcatggggagtatgattttgtaattgatattgagaaaccaccattcgatatgattaagattaactcattaaatattaattaattatggcttgaaatgaacattttgtcccatttttggtttgaagccagtattgacatattgcttatatcctctttggttttttcgtgtttttcattgtccagatgagcatcaagttctgcctccagcatgtattcaacggcacgtttgtacatctgtttgaagaaagtggttaaatcaatcttctccatttttaaaggacctgtagaaatccttgttgtttaataattcttctttgtcgatcataactatataggttaaaaataataaaaagttatttccgtaaaatttttttgagctataagggctcaaaaatttttcagaaataactttttaacttacacagttaatgagacactacccttttatttcaggctctgtcttattaataaactctgatagctcttttacaacggactgtccccattcactgatttcaattttttggctgatgtatgatgtatgctccaacattccaatagaaatttattaattctgaattcacagcctttacggcattatttcgagctttctttatgatttgaataacatcggaaattggtctttcataagatgtaaagcattttaatgagaacaaatttactctaatattttataaaaagaaatctgttaaaaatgtttgatagttacaaaatacaccaaatcttctgtaaattaaccgacttagccagtcatattttaaactgataatggatcaataaatctgtttctcacgaagctaccttaatttaatgtcagattctgcaaagacaaaataagcttttttaattcagatattctaaaacatttgtcttttccagagtaaatttcttatgagaatcattttcgattgttatagaagagtttttttcaaaaagctcctttattttacagaatttctctaagttcattttaaccgtatctgtatcatttattctgataatcttatccgttaaatgtaattctgaaagctggggaatctccaacttatttacgataacaagactattggcaaccggggcaactgtgattccaaagctattatattcgggagtcttttccgcttttcccaaaattatttttttattaataaaatccagatcaaccaaatagttttctataaattttgttccaattaaattaggagaatcagaactgctgtctatgatctgatctccaagttttgtgttgccgagctccacttccatcagatcaacttgtctctgtccttttacaatactgtttagtgattgagataaaagcccttcaaaagtcaaaaaatctttatcctttatttggttgtaagatttctcattaatcgtaaaacccattcctgaacctgtgtcgaaaataaaatcgatattatgatttcttattttaacattaatttttggaacacctgtaaaattttcctgagaaaaagatactgctgcaaaattgtttgacagttcttgagatttttcaaaaacattgatggttttggttttaaaatcaattctccatactttatctttcatcatattagctccgaatattccacttattttcttacaagcacgaccactcatccagctaatatctgcaaatgaaaaatttacatcttttattgttaaatcggatatttgaaaatgatctgttgaaaaaacttccattttcgattttgcattatttgcgtcaaccccttcaaaaataatcttgcttttcttttcatttaactgaccttttaattcggatgaaacaattgtaaaagctcctgagtcaaaaataaaattgtggggaacattcttaatatttacactaaccactattttcccatcaatcagttcaaagggtattgttgtagcattaaaaaagaagggaaataatattaatataagtaaaaataaatgtctttgaagatttctcattttatattgatcttgatgtcaaacaaatataggcataaaaaataaagactgccaataaggcagtcctaatttaattaccaagtccacttaattcctacagaacctgttacggttgtagctcctgtttgcggattggttgttgtactgatgtttgtggaaagctcctttttcttctttcctcttgctgcaaatgccgatggaggagtcgtatcctgcatctctacaggaacctgtcccaagaagccggctgccaaaatgaatcctgttactnnnnnnnnnnnnnnnnnnnnnnnnnnnnnnnnnnnnnnnnnnnnnnnnnnnnnnnnnnnnnnnnnnnnnnnnnnnnnnnnnnnnnnnnnnnnnnnnnnnnaatcacgggcgatatcaaagtatcattcgagcgtctgtctttatcctgctgcttttgctcttctggttaatatttttaactaagttatcaatctgttttgtttaatgcaaacttaccattgagcggtctgtctgagctctttttgaggattcggcggcggcaaagccgccgccgaatcctcaaaaaagcgagtagcgaaagcgcgaaacagctcctgataaaaaacttttttatcggaaaaccgaagattcgatttaacctttctctttgtaacaaatctttaatatgaacgactattcgtataaataatctttttagtaatgaaaaattcaaaatttgtgtcattactttttgttttgtctgcaggaagtatgatgtttgcacaggatgacttaatcaacaagttaaaaaacaaccaatcccagaatgctaatttccagtttaccacgctgaaagatgtgggtgcaacttcggtaaagaatcagggttcttcgggaacctgctggagctattcgggaaactctttccttgagtctgagatgcagagaatgggcaaaaaacctgttgatctggcggagatatacactgcaagaaattcttaccacgataaagctaaattatatgttctgaataacggcgcgatcagttggggagacggcggagagcttcacgacgtgattaatatgtataaaaaatacggagcagttccacaggatgtttacacaggtttgaagcaggggcagagtttgaataatttctctgaaatgcagggaaaattgaagcctgttctggacagtttggttcaggctggttccaaaggaaaactgacggacaactggatgtcttccgttgatgctattttggatgaatatcttggaaaagttcctgccaactttacatatgaaggaaaatcttacacgccacaaacttttgcgaaagaggttgtaggaatcaacccggaagattatgtagaactttcttcttacaaggattatccgtactaccagaaatttgtagttccgattccggataactggagccatgattctgactggaatgtaccgatgaaagatttaacttcaattattgataatgctgtaaataaaggatattctgtaggttgggcaacagatgtttctgagccttatttctcttacaaaaacggagttgcttatgttccggacatggatcttgaccaaatcacaaaagaaaataaaggaactttattcacagaaccgaaaaaagacaagacgattactgaagatatgcgtcagaaggctttgaataatctttctacgacggacgaccacggaatgcacatcgtaggattggcaaaagatcagtcggggaaagagtattatatggtgaaaaattcatggggtgtaacgaatgattttgaagggtatatttatgtaacaagaccttatgtagaatacaaatcgacagcaattctggttcataaggatgcgcttccaaaatcaattaaaaagcaactgaagccaacaaaaaatattgggctgtaaatctgatcacttttgtcattttgatgacaattttagatatttaaatctgttaaaaaaccgttctcattttttgggaacggttttattttgtttattgttttttaagtagctaaagctttgctgtttaaatatcatgttgattttctttagtcagatttaattttttacatgtaaaatctaaataatgaattgaaagcagtttcatttttaagagctgtaatattttttcattcaatggagaaatattatatttgataattaaattaaatttatttaatatgaaaaacttaagaaaattaccaaaatctgatttaaaaagaattaatggaggaaatgctccggaatgtccagtaaatactgttgagtgttactatccgccaaaaaatggaattccgggatactggaaatgtgtttccgttactttcggatgtcctaattaaatgtaaattcaggtgtctgaaattaacgttcttttaaatcattagaatatttcaaagaaaaaccgcttcagaatatctcctgaagcggtttcgtttaaaataattgataggtaaaattatgtagaaagtgaatagttaattcgatttgctggttaatgaatggttcaataaaaactggcagcaaagcaattcaccattgacttttgacttttaataaagtgttgccatgctttcggctttgaaatcctgaagttcgtccatttttccttcttttactttctttacccattcaggatcctgtaaaagtgcacgaccaaccgcaaccagatcgaaatctcctctttccagtcttttcgtaagctccgttaaatctgctttttcagttccctgccctccgaaagccgccataaaatctccttcaagacctacagaacctacagtaatggttggctgtccggtaattttctttgcccatcctgcgaaattaagatcagaaccttcgaattctgcttcccagaaacgtctttgagagcagtggaaaatatcaactcccgcttctttcaatggcaataaccactcttccatttcttccggtgtattcgcaagttttgcagaataatcctgctgtttccattgagaaagacgaataataatcgtgaaatcttcaccaaccgccgctctgatcgctttaaccacatcaaccgcaaatctgcttctctctttcagcgttttaccaccatactcatcggttcttgtattggttacatcccagaaaaactggtcgatgagataaccatgcgctccgtgaatttccaacacatcgaatcccagatctttcgcagattttgcagaagccgcaaactgagcaatggtatcctgaatatcttccaacgtcattgtagaagctttttccatctcaactgaaggataatcttctgacattcttgtgtctccgacgtgccagatttgtggtcccatttttcctccgttttcatgaactgcatcgattacatttttccatccgttcaatgcttctgttccgtaaaaatccgggatattctgtaagttttttgaagcaggtctgttaattaccgttccttccgaaagaattaatcccacttcggaagccgctcttcttgcataataatctgtgatttgctgtgtaggaactccgttatcggattgtgctctcgtcatcggagccattacgattctatttttaagttctaaattcttgtatttaaaaggttgaaataatgattctgtgctcatttttaacttaattattttataattgttacacaaagtaactaataatagttcatatttgtatcttacaaagaaaaacagtggtaactttgtggtaactgatgatggtaacgtggaggtaacagtaaggttgaggttgaggttgaggtagagtctaagattgagaggatcctataattttagtgtggtgatattgtagaagatttctgttctcctataagtgaaacggctttgtgaaacttgaaacagttagtataaaaaaatctttgtgaacttcgtgttcaacaaaaaaatagaaattagaaatacatctttatgaaaaagaacgaattaatgcaatacagttgtcctttgggaaaagcaatgtctgctctgggaagcaaatggaaacccatcattgttttggtaattaaagaccgaaaattgcgtttcggagaattggcggcgaggattaatgtgatctccagaaaagttctgaccgaccaattgagagaaatggaatcggacggattggtaattcgtgaagagtttaaagaaattcctccaagagttgagtattcactcacagaaaaaggattggcgctattgccaattttgtatcaactggaagaatgggaaacgaaatatcatgtgtatgatccggagaaagagaaggactgtaaaatgattttggaagggaagaaagttcagaagaaagttgtttgatggctttcttttaaggttaaaaatatcttaattttttacaatcaacatattagcaaaaggcgtaattttcttattttcaataatctccaagcccgcttcagaaatagatttcgtccattgttttttacttaaaaagtggaatgctccgatgttaaagaaaagaaaatttgtcagatctctaaattgttctgaaacaatgattacgccatcatcttttaaaattctctttgcttctttgaaaaataaaactctttggtcatgatctaaaatttcgtgaagtgcagttatagcaagaattacatcatgagattgattttcaaaaggaagattatccggtttaatttttatttcctttggattgggtggaaatactttctttgaagtttcgattcctttttcctgttcgtgacgattttcaaaaatatcacaaaccgttaaattcaaatccggatatttttcctccaatcgttttgacaaaggatcaaagcttgcgtgaactaaaattgcattttctgttttattccaatctacaattccttttaacttctttaattcgtacaaatctgaatgatcatataaaatgtaagaagcgagaagtgatgcaaaaatatttattatgataagtgcgcttaaaattcttaatattaaaataaacggagttgaattaatccaaaatgataatgcacagagaagaaccgaaacgataagcccaagtactattttttgataattaaagagaacaacaagttttgtgattttcataaataggctttaaaatctaatttacaaattcttaacaaaaaaaccgcttccaaaaagaaagcggtttcaaaattatctaaaatcccaattaaaatatcgcaggatatttctgaggatttgtttcattaaataatgcgtaaattttttcaaccatatcatccgcagaaggtttgctgaaataatctccgtcacttgcatacgcaggtctgtgatcgtttgcagaaattgtcaacggatcagaatctaagaatctgaacgctttttgtttttctaaaatctgctgaagaataaacgcagaagttccgccttccacatcttcgtcgattacgaccaatcggtttgttttctttacagattctgcaatttcatgtgttaaatcaaaaggaattaatgactgaacatcaatcacttccgcagaaattcctaatttttcaagctcttccgctgcttccattacaattctccatgtagaaccgtaagtaaccaacgtaacatcttttccttcttttgttacctcgatttttccgacaggaacagtgaattcacctaaattatccggttgtttttcttttaatctgtacccatttaaacattcaacgattacagccggatcatcgctctgaagcatggtgttgtagaatccggcagccttggttaagtttctcggaaccaataccagaattcccttagaaagattaagaattcccgccatcggagaacctgaatgccaaactccttccagtctgtgacctctcgttctgatgatgaccggcgatttctgacctccttttgttctgtactgaaccgttgccaaatcatcgctcattccctgcaaacagtacagaatataatcaagatactggatttcggcgattggtcttaaacctctcattgccattccgattccctgtcctagaatggttgcttcacggattcccgtatcggcaatacgaacgtcaccgtatttttcctgcattccttcaagaccttggtttacgtcaccgatatttccggcatcttctccaaagactaaagtttcaggatatttttcgaatattttatcgaaattgtttcttaccactactcttccatccacatcttcagaagcgtcggaataaatgggcttaatttcttttacgttttctgctttccactgagactgagaatataagtgagaagaataattgtctttttcaacctcaaagatctcgttgtatttctgcatcagttggtttctttctgcagaatttgttcctcttgttgccagtaaagattttcttaccaaatggaaaacatcttttttcgcttttgaaacgagtttattgaattggctgatgtaattttcaatttcagcattttgtcctttaagattttcaaccaaaggtaaaacggaagcgattaagtctgtaattgttttctggtaattttcccaagcctgtttctgtcctgtttttaccgtttttttagcttcattatcaatagcatccagctcttctgctgttgccagaacttcttctttgccttcaatttcaatggaatagtttaaaatccattctctgaatttcaccaatccgtcaaactgagattcccaagacagacgctcttcatttttatacctttcatgagatcctgaagtagagtgaccttgaggctgagtaacttcaatcacgtgaaccactaccggaacgctttctactcttgcaaactgttctgctctagcataagcatccaaaagtgcaggataatcccaagcttttacctgaatgatttcacatccctggttttctccttcctttctctggaaaccgctcagcatttcagcgatatcggcttttgctctctgatttttcgtaggaacagaaattccgtacccgtcgtcccagatcgaaactaccattggaacctgaagcgcacaagccgcattcagtgtttcccagaaatgaccttctgctgtagaagcatccccgattgttccgaaagcaatctcatttccttctctggaaaacttttcagagccttcgaattttacggttttataaattttagaagcctgagccaatcctaataatctcggcatctgtcccgcagtaggagaaatgtcggaagagatatttttctgagccgttagatctttccagcttccgtcttcatttaaacttcttgtcgcaaagtgaccgttcatctgtcttccggctgaagcaggttctctttccacgcttgtatctgcatacaattgtgcaaaaaaactttcaacagtcaacgcatttacagccaatgcaaaggtctgatctctgtaatatcccgaacggaagtctccatctctgaaaactttcgccattgcaagctgaggaagctcttttccgtccccaaaaataccaaacttagcttttcccgtaagaacttctcttcttcccaagtaggacatttcacgagaaatccttcctaatttataatcttcaagtatctgatttttaaaatcttgaaaggaaatttgctgtgtttcaatataggttgtctgcatagccaaatattaaatatttttattttgaagtattttgctaatatacactttttaaattaattttaatttttaataatcttttttaaaaatttgataataaaataaattgtgtttatattggaataaatttgtaaatgatggaaaaaaaatcgtctcatattcttaatgcatcgagtaatcttttgggattttctctggtaatcatcacttcattaaagatatcaaaaataagccacagtacgcatttggacgagtttgccggagttgcctgtctgttttttgccttcagttgctttttttctttcctcgcgataagatcgaagtatgaaggacgttctttcagatttgaaactattgcggattatttatttttaatcgctttattttgcattgttctggctgtaattattgtgacagtaaaaataatttaactttaatctgataaatccatattaaattatatttaaacaaacaacatcaataaccatatattaatattaaaaacgcattaaataacaaaataaaatcaacgaaaatcaaatttaattaaaaatatccaaaatcaatcggtacgatttttgaagagtttggaaaaaaattcacaaatttcaaaaatcatgagaaacaaattatttcaggtaactaaaatattaccctttattttgataccattgtcttcttacgcacaggtaggagttaacactgctaatcctcaaacgacctttcatgtagacggaaacaaagataatgcggcttccggaactccaactaccacacaacaagctaatgattttgcaataacaaattccggaaatgtaggaataagcacgataaatcccagtgaaaaactggatatagcaacaggaaatgtaagagttcgtgccatcaattccaatacaggagttcccggaacagataaatatgtagtcgcagatggaaacggtgtattaaaaaccataaattttaccacaacagatcttttccatgcgcggttatctgccgatcagaacgcaaacagcggcgtgattgctactttactttttgcagctcctttggtaacttcaacgtattattcttacaattcaactaccggaacgcttaccttcaatcaggcaggaaattatattgtaacgtttcaggcaagttttggaaatgttactgcaggtacacagcttgttttgggagtaagacctgttcccgataataattatcttgcgagaggaagccattacgcgggagcggatacccctacactcactgccactgtcagaattggggaactcatgaactacacgacgatgcttattgtaccgagtgcaggatatcaggttcgttttacggcagctccgaatcaaaactgtacggttttagcttcagaaacaggaagtacaggaagtggtaatgttaccaatattacgattcagaaaatataaccaataaaaaatcggaacgttttgcacattccgatttttttattctgaaaaatttatatctatttaaaactttctttcaatgacataatccagcatgattcgcaatgacttttttgcttcagaatcgggaaattcgttcagaatatcaattgctttttgctgaaagtctttcattacggtaatcgcataatccagacctccggaacttttaacaaaattaatcagctcttttacgcgtttctgatcgttattgtaacgtttaatggtattgaaatagtattttctgtctttttcgtttgctatttttaaagtatgaatcaaaggcagcgtcattttctgttctttgatatcaattcctaccggctttccgataacgtttgaagttaaataatcaaaaaggtcgtctttgatctggaaagccattccggtataggttccgaaatccatcatttttttagccagaacttcgtctgcattattcgacaaaacaccgatttcgcagcatgcagcaattaaagtcgctgttttctgacggatgatttcataataaacctcttctgtaatatccagttttctggctttctccaactgaagaagctctccttcggacatttcgcggatggttcttgaaataacacctaataaatcgtagtctttatgatctgtggataataaaaccgatttggataaaagataatctccaaccaaaacagcaatcttgtttttccacaacgcattgattgaaaagaaattacgacgtttaaaactttcatccaccacatcatcatgcaccagagttgccgtgtgaatcagctcgatcatggaagctccgcgatacgttttttcgttgacgtcgccgactaattttgcacaaagaaagacaaacatcggacgcatctgctttccttttgtggtaacgataaaacgagtgactttatctagtaaaggtactttgctctgcatggattcataaaacttctgctcgaaaagtttcatttcctcattgatcggtcgcttgatttcttcaacggtgttcgccacaatctttgaataagagataaattattaattcccacaaagataatttttttcgggcaattttaagggaaattaatctttgagtttatctatcggaataaaataaaggctttgttttcctccgccaattggagaatgaaacttttcacccgaaatatagattcctgtttcatcaacggcaattccttcaatttgcccaatagataaagcgcttccgagataataatgtttgggattttgtttgaaaaaaattcccggctctgcttcatcaaaaatatctaaaaaaacttctgtcttcttggtatagcctattaaatagagttttttattaaaataagaagcgtctgttaccataaaaccggtcttgtaattttcgattttctgagcgttctgcttttctgaaatttcaggatagataaggtaatgactcgttgattttgaaccccactctttcgtaaaaagatgaattttaccattcagataaatcatcgcttccgcatcgaaatccgtttcggaatatttgggaataaattcctgctgttcaggatattcaaaagaaattaatttaaccgaatcgttttttgatgaattatcttcaaaaggaactttataaatttcgaggtcttttcttgttccgccgttgtttccgaaatctccgatgtagaagtttttaccgtcgtttgtaagtgcttcccaatctttattttttccgttgatttgtatcgtgccgatgatttgtcctgtcgatttatccaactcaaaaagttcgggagaatttccgctgtcattaaaagtatacagttttccgttcattaaacttaaaccggaagtttccttcaccttatcatccaaattaccaattctgtattttctgattttgaaaagttcagcctgttgggaaaatgagaaggtagaaattgtaagggtaagtatgaggaaaagctttttcatgaggtaaaaatatttatttaaacacaaatggcactaattttttatacaaaattagaagttcctctgtcattctgacgaaggaagaatctatttttaacagatagatcgcaaaagttttatttaaaaattttatgcttttaatttcgcaaaggcaacttatttaaactaatttcagaattcaccacaaaagatgcaaaagataatgataatgcgaatttccagaataataaaagcactcaaaagaataaaaatcaaagatttttaaaaactactgtgatcttcttatttataatcatcaaaatctaaataaccgtttagttcatctttgcggttaaataaaaagtttaaacagacttaagattatatttaaatccaaataattaaaatatttgtgaaatccgtgtaaaatttgtgttgtttatgtttagaaaactaagcagatttcttctgaatctgatctttatttttattttttcttgcccagtaatctttttgatattgtctcacggtttttccggttccgtcgtgtcgccatcccggagaattaaaaatataattgatacgatctgaaaatttcagtcccggctgtttaatatctttccatatttttctccattcgtacagaagaaccgtatcgggtttattatccggcatttttggataaataccatatttcacaggaacattggggtcttctttttcaaaagttccgaaaattttatcccagataatgagacacattcccatatttctgtcaagatatttgatattgcacgcatgatgaacacggtgatgagaaggcgttaccaaaatatactcaagtaagcccatgcttttcacagtctgcgtatgaacccacgttccatatacctgaccgattgcatacaccaccataatgtgccatggattgaatcctaaaaaagccagtggcgaaaagtataaatatcggtaaagcggctgtaaaaccggacttctgaaacctgttgttaaattgaaatattctgagttgtggtgcgtaatatgaaccgcccagaatgctctggaatgatgatctacataatggagaacgtaatatgcaaaatccgttaccacaaagcaaatcagccagtaccagatcgtaaaatcccacgagaaaaatctaagattgtaaaagaagaacatgactcccattgcaaaagccttcatcaataaatccagtccgaaattcattaatgccagaaaaacgcttgttgccacatcttttttatcgtataatttagcctccgaaacatgactataaatcatttcggctaaaataacagttgcatgaacaggaatagaccatgaatagacactttccaatccattttcatccataaagtaatccatcatcacttttaaaatttgtggtacaaagttatgattttaggaaagcgttaagaaaattttttgatttttttaataaaattttaatccgcagatttattagcaagctgtccgcaggctgcatcgatgtctccaccacgactttttcttaccacgcagacaattcctgcattttccaactgacggatataattttcttctgcctgtttgttgcactggtcatattttccgtcaccaataggattgtactgaattaaattaactttagaaggaacctgtttgcagtatttaatcagagctttgatatcttcatcaccatcattaatgtccttccagacacagtattcgaaagtaatcacagagcctgtttttttataccagtactgaagagattccatgatttccgttagaggaaatttatcggaaaaaggcataatctcattacgttttacttcgattgcggaatgaagtgataaagctaatttcactttcagttcttcatcagcaagcattttgatcatttttggaattcctgaagtagaaaccgtaattcttctcggagacattcccagaccttccggctgggtaatttttctgattgcttctactacatttttgtaattcatcatcggctctcccattcccataaaaacaatgttggaaagcggtctgtcgaaatacaatttgctctggctgtcgattaaagcaacctgatctacgatctcggcaacttcaagatttctcattcttttcagacgagctgttgcgcagaattcgcagtttaatgaacatcccacctgcgaagaaacacaagcggttgttctcgtttctgtaggaataagaacagattccaccaataaaccgtcgtgtaatttcactccgtttttaatggttccgtctgtacttttctgaagcagatccacagaaacaggattgatggtatactcttccgcaattctctcacgaagagtttttgaaagattcgtcatttcatcaatcgagtgaagatttttactccacaaccagtcatatacctgtttcgcacgaaacggtttctctcccaaagaaacaaagtattctttgagctggtccagtgataaagttctgatgtctttcattatattgttggaagttagatgtcagaagatggaagaaaaattgggcgccgaattgtaaacttccaacacccaacttccagcttccgttcttataaaattagcattgcgtctccgtaagagtagaatttgtatttctcttttacggcttcttcgtaggcatgcattacaaaatctcttcctgcaaacgctgcaatcatcataattaatgtagattttggcgtgtggaagttcgtaatcatacagttggctactccgaaatcgtgtggcggataaatgaatttatttgtccagccgtggaatgcagagatttttttatttgaagaaacagaagtttcaagtgttctcatcgtagtcgttccaacggcacaaactcttctgttcgcatcaacagcgttgttgatgatctgagcgtttttctcatcaataaagatctcttcagactccattttatgcttagaaagatcttctacctcaattggattgaaagttcctaaaccaacatgaagtgtaacttcagcaaaattaattcctttgatctccaatctcttcattaagtgctttgaaaagtgaagacccgctgtaggagctgcaaccgcaccttctacttttgcataaatcgtctgatatctttctgcatcttcaggctcaacgtctcttttgatgtattttggaagcggagtttctcctaattctttcaacttagctctgaattcttcgtaagaaccgtcgaataagaatctcaatgttcttcctcttgaagtcgtgttatcgataacttcagcaaccaaagactcgtcttctgtgaagaataatttgttaccgattctgatttttcttgcaggatctaccaaaacatcccaaacacgggtttctttatcaagctctctcaaaaggaaaacttcaatctttgctcctgttttttctttgtttccgtataaacgtgcaggaaaaactttagtattgttaaagataaataaatcatcttcctcaaaataatccacaacatccttgaataatttgtgctcgatagtctgtgtttttctatcaagtaccattagcctggcttcgtctctgtgctctgatgggtgttctgccaataattctgcaggaagatcaaaattaaaatctgatgttttcattttttaaattacggtttaaaaattattgaaattacaaggtgtaattttcggagtgcaaatatacgacattcgatacccctttgtcaagtattatttacacagatgttaaattaactatttttacattttttaaataaatacaatcaactaataatcaatagtataattattttcactttgcttttttaaatgaaatgcgtttgtattcctttaaattaaaaaggtgtatttaagaattttgtttagtcttgcaagtattcaaacgcgaggctaaacagagaatttattttaaattattgaaatcaaaataaacaaaggcattttacttattttcgaaatacgaagattcaaggtatttaaattaatttttcttgaaataaaaaaccgtgattttccgatattttttaagccataaaaaagctatttttgagaacattaaaaatttacactatgagcaaatattcgattgaatcttttgtgaatgaaacgaaagaaaacccaatggaaagagattatttcgagctggaaaaaccctctcttctggagatcaacctcaacaatcagtctgtctggacgaaggcaggaagcatggttagctacatcggaaacgttaatttcgaaagacagggaatgctttccggaggaatcggaaatttattgaaaaaagcgatcagcggcgaaggcacaaaattaatgaaagccgaaggaaccggaaaattatatgttgcggattccgggaaaaaagttcgtattctttatttaaataatgaagcagtctgcgtaaacggaaacgatgttttggcacacgaacaaagtattaaaagcgacattaccatgctgaaaagtattgcaggcgtaatgtcgggcggactttttcaggtaaagctttcaggaacaggacacattgctattaccactcacggtgagcccttaacgttactggtaactccggatgcgccggttttcacagatccgaatgccaccgttgcatggtccggaaacctttctcctgaactgaaaaccaacgtttctttcaaaagtctgatcggaagaggaagcggtgaagaattccagatgaagttttcggggaatggatgggttctgattcagccttatgaggaggtttacaggattgagaagtaagtatttcaataataaatataagaggctgtttcactttcgagactgcctcttatattttaattatttttaaattttaactggctttgacttatatttatagtgaaatcctgtggttcaatagcatctagtgacagattaatttctaaatcttcaaacttttttgaggcggattttaaaatatagttactgctgaattttactttcttatcaatttcatagtaatcaaacaataattgaagcccaacaaatgacaaatcatctttaaagtctgcgaatacaacctccgcagaagctcttggattcttcattttctcatttgtaaattctttaatcgaataattaacaagtccatcattttgttttttaagcaattcggaattgaaaaatcttcttttggattcttcttcaaattgctttttaacaaaaggcattctcattgaatatttataatcaaaatcactttcctttaaaggaaattttgtattccttatatcaaaataatgttgcaaattatttttaaaatctataattgaagcagtgagcctatttctattaacaggtatgaaaaaaatcctgtaagaatgatcttgagaattaacaatatattgcaaatccataatttcaggtcgttctttattatttttctttaattcatgcctgtatctaatgtaataatcaaaatgatattcctgtgaaaaaacagtagtgaaaattaaggtcagaaataatggtaatagttttttcataaatgcatttttatcttcttccactcctccagtttcttttcaaaagaaaccgtatgaagcgggcttgtagaaggcagtaaaaatacaggtattttataattctttcctaaaattttctgcaaatttttataggactttccgccgttacaaaagattgccttaatattcggataatcttccaggagctcttcaatctggttggcttcttcattttttatttcagaatccagacttccttttctttcgcaggaatcaataacatcccaaagtgcaatgttgtgtttctttaaaatattgattctttccgcataatcttctgtaaattcttcgttgagcaattcaaagatgattttccagaatttgttttggggatgaccataatactgttgtttttctaacgattttacaccgggaattgatcccagaatgatgattttagaattgttgtcgatgatgggtggaaaggaagatattctgttttgcataaatcaaatttataggtttttattttttttaacgcgatgaacgctaagattttcctttaaaacttatctaaacttctttaccgcaaaagatgcaaaagattgttacattttagttgtttaagtttactacttaaatggaaaaaagaacacataagtttaaaaaaatcaaagatttttctctttgcagacttttgaaatactttacataaatccaataaagtcttttgtctcttttacagttaaatttaaaatgagttaaaaaaacttttaaataaagctgaatatttttcgttgacaatggcgtttcactcagccagtgagcatattttcgaaaaacaaaaaacggactaaaagcccgttttctgttgattttatatttgtttaaaccaccccgtcaaaaattctatgaatttttgtcacccctacaaaggaggggaattcagaagggaagattatatttataaagtttcttttagccagtcgaagaattctctctgccaaaccaatccgttttgtggatgcagcacccagtgattttcattcgggaaataaaccagtttagatttcaaacctctcagttttgctgcctgaaatgcttcctgtccctgctcgtaaggaacacggtaatctattccgccctgaacgatcataatcggcttattccatttatcaacaaaattgcttgggttgaattccgtataagcttttggctgtggtttttcccatggtgaacctaaatcccagttcgcaaaccaaagttcttctgttgttaaataccatgatttcatatcaaataatccatcgtgcgcgatgaacgttttgaatctgttttcgtgaattcctgctaacataaatacgctgtatcctccataacttgctccgacagcagcaactctgcttccgtcaacgtaaggtaaagtttttgcataatctgttgcggcaagataatctctcattggttgtcctccccagtctctggagatttcttcattccattttgttccccaacccggcattcctcttctgtttggtgcaacaacgatatatccgttggctgccattaaagcaaagttccatcgtgtgctgaaaaactgcgttaaggcagattgcggacctccctgacaataaacaagggttggatattttttattcggatcaaagtttggcggataatggaaccacactcccatttcttttccgtccgtagtttttaccattttcagttcagattttccctgagccaactgtgcatacatttctttattggcttccgtaacctgcttcatttctccgtttttaaggttaacagagaaaatatctgtggcgtgattgatatcggttcttcctaccaaaagtgaagttttctgatcggcaaaaatttcgttcacatcaaaatcaccttttgtgatctgctgaactttagcatttttcggatctaaagagaataactgctttgttcctctgaaagctgccgtgaaatagatcatttttgaatctccgctccagaaaacatctccggaaacactttcgtcccaacctgcggtgaggtttgttgtttttccggatttccaatccatgatttttacatcatttttatcggcttcataaccatctcttgccatactttgccacaaaagtgattttccgtccggactgaatttcggattaacgtcgtatcctttattggattcggttaaattttttgttgttcctgaagcaagatcgtatgcaaaaatatccgtgtttgtgcttgtagagtattctttgccgcttttcggtttagttacatataaaagctgtgcagaatccgggctccagatgaaatcttccgctccgccaaaaggtctttgcggagaatcccacatcttcccttccagtaaatcttttgcagaatctgctttatctgaaacatttaccacgaaaacatgattgtattttccttcattgaaataatcccagtgtctgtgattcagatctgtataaacttgtgccgtggttttcggagtatcggaatatttgtcttttcccattactttttctaccaaaacctgcttgctgaaggctatttttttaccgtcgggagaaataacaatgttgtctgcttcaccaatggtgtaaaactccgtccatgttttaccattgtcttttgaaaggaaaattttatcaccttcctgcgcgtacaatccgtttttgtcccactgaatcagtgcttttttgcctaaatcaactttcacggactggttgttcagaacattcaggaaatagttctcgctttttgttttttcggttttaagatcggtctgtcctattttgtagattaaagaggactgatccggagaaactgcctgtactccaacttttttcaaagtccataaaatttcaggcgtcattagttgttgtgcattcattaagagcggagctgccaaagccagcagactgtacttaagtttcatattaattcattttttatgactttatcattcaatccaatcataaagtctttatttaattcaaagattgccaaagttaactatttttaaaacacaaacgcgcacaaaaaatcgcctgtcgttttaacaggcgatttttatgtcattttaaattttaaattaatctccgtccgaaaacattgagtttgccagtgagctgacaatggaaagcaggatgctgaaaataagtgcccataaaaatccgccgacctccatactgtctataaaataatccgcgatcaggatgataattgcattgattactaaggtgaacagccccaatgtaataatcgttaaaggcaatcccaaaatattaagaacaggttttacaattaaatttaaaagtcctaaaacgatggcaaaaatgatcgctccgccaaatcctgtaaagtgtactccaggtaaaatccatgttaaaagataagcaacgatggccgttaccaaaagtcgaataattaagttcatagtatgatttttttaatgttgttgatgcgtgttcctgtgcaaaagctattccacttgtttgaaaaattatctgatcttcatcatcgtaaccaaagacgtggcaacatgactttcggaagctccgtcttcatctaccacataaatttctgtacggatcacgctgatctttgaacctccttttatcacataagatttcgaaattaaaacgtctccgatggctggtcttaaataattgactttcaactcaacggttacgacataacagtcttcttcgtaatgacttactgcagcataaccggaagaaacatccaccaaagaagcaatcatggctccgttgaacattcccgcttttcttgtcatgagttccatttttgggattttcatggaaatgaagtcggtttctacttccagaagttcggctttgtagaattttaatgtttcggagcggttgaaactgtcggtgatgagctgttttttatggggtgtcattttttgtttataatttgaatacaagttgcacaattttttttacaaatgcgaaaatattatgtttgcttttcatttaaacacaaattgcacggatagatttcacaaatggcacaaatattttaaccatgaaggatatttaagtagttaagaattattaagttggacaaagccatctttaagtttatatttaaacacgaatggcacgagtagatttcacaaatggcgcaaatattttaaccgttaagaatatttgagaggttaagaattattatgttttggctgaagttatttaagcacgaatagatttcacaaatggcacaaatattttaaccctgaaggatatttaaggggttaagaattattatgttttggctgaagccgttgttttgggtaaaacttgaaagcggactaaagtccgctcctattgatgtttcgttgtggtattcgtgaaaaatttgtggtatttgtgtttaatctttagtttaaaacaatctgaaattgctcatccatcgacaaaataccttctgccaaactttccggatgggtggtaaagccttttaattttgaggtttttccttttaagaccaaatccattagctgtttgtccgaaagtttttttccgaagatctcaaaggaaactttaaagccgcagtttttaaaatcggaacatccgacagcggtttttcctttcatcaaatgatgttctttgcatttcgggcatttggtttcttcccacgactgaagttcttttttaacggcaggttcacgttttttcttttcttttacctcctccactttctcttcttccaaagaaatgactttcccttttccgtcgactacttttttggtaagctccgtcaccatctggatgagctcttccttaaaatgattggcttcatattcacctttttcaatttttcggagcttcagttcccactctccggttaattcgggacttttcagcaattcgtcttcaatggtgtcaatcagttgaattccggtttgggtggcgatgagattttttcttttcttctcgatatatttccgcttgaaaagggtttcgataatattggcgcgggttgaaggtcttccgataccgttatttttcagaagttcgcgcagttcatcatcttccacctgctttccggcggtttccatagctctcagcaaagttgcttccgtgtaaggttttggcggagtcgtttttccctgatggatcatcggatcatgcggtccggtttctcctacggtaaattcgggaatggtctgttcttcttccttttctttttctttatcgttgggttcttctttcggttctttggcataaacggctctccatcccggctccaacacctgccttccactggttttgaaaggaatggttcctacttttccttctactaaagtattggaaattttacactcgggataaaatacggcaatgaaacgtttcgcaaccagatcataaactaacttttcttccctgcttaaattctgggaaggcggaacttccgtcggaataattgcgtggtgatctgttactttggtatcatcaaaaaccgctttcgatttgggaatcggagcttccagtaaaggggcgataagttcctgatagaaatacattttcttcagaattccttcgattttcggatataaactttcagacaaataggttgtatccacacgcggatacgtaacgtgctttttctcgtaaagactctgaatataatttaaagtattctccgcagaatagccgtattttttgttggcttccacctgaagtgccgttaaatcgaacagtcttggatttttttcttttccttctttaatttcaaaagaaacgatttcgaaaggattctgttttaaatattccagccctttttctgcgcgttccaatgttttgagacggtcgatcgcggcgttaaaaataacttcgcggtatttggttttcagttcccaatattcttcagtgttaaaagtatcaatttctttctgacgctgaacgagcattgccaaagtgggagtctgcactcttccgatagatagaacggctttatttccgccaaattttttcgtaaaaagcctcgttgcattaattcccagcaaccagtctccgatcgctcttgcgtttcctgcgagatagagatttttgtaatcttcggcaggttttagattggcaaaaccttctttaatcgcttcttcggtaagggatgaaatccacaaacgctgaataggcttgttgcattttgctttctgtaaaacccatctctggatcagttctccttcctgaccggcatccccgcaattaatgacctcatcacattcttcgactaatctttcaataactttaaactgattttctacgcctttgttggggattaatttgatcccgaaattattgggaataatgggcagcagaaacaggttccacgatttgtactgcggaccgtaatcgtgtggttctttgagggtgcaaagatgcccgaaagtccatgtcacacaatagccgtttccttccatatagccctgcttcggcgtggtggcgcccaacactttggcgatatctctggcaacactgggtttttcggcaatacaaagtttcatgaatgtctcggaattttttggagagggcaaaaatcgggaatttttttggattttactaatttgcggattgttggttgaaaataagcctgtctgaactttttaaaatgaagggtattacttaaattttttaaaaatagatacgtcatgattgtcattccggaggaatctatactcgaatattttgtgtgaatttcttagatccttacaggatgacagatgtggcggaaagttgggcgttttcaaacgcaaagtttttttttatgatggtgattattttgaggaaacaaagttatgcagatttcatctgtgatgaagcgtgtgttttagcatctatttttctttgtttatttttatagaacaattttacattgtctttgctttggaattttaaattttattttttccagaatttctaatactttgcttagattctttcaggatgacaaatattgcggaaagttgggcgttttcaaacgcaaagtttctttttatgatggtgattattttgaggaagcaaagttatgcagatttcatctgtgatgaagcgtgtgttttagcatctgtcttgcttgatttttttataatttctaatattttacttagattctttcaggataacaaatgtggcggaaagttcggcgttttcaaacgcaaagtttctttttatgatggtgtttattttgaggaagcaaagttatgcagatttcatctgtgatgaagcgtgtgttttagcatctgtttttctttgtttatttttttataatttctaatacttcgcttagatccttacacgatgacaaatgtgccggaaaagaattcagagttaaaagacaaatttgtctgaagaaattcaaaacagtcctgtaacggcttttcgggtaatcgggaaagtatgtttcacccctgcaagagactttccgggaacctcgaaagtttcctgcacccctgcaagaaactttcccggaaattaaaaaagctcccttaaaaaagagagcttcaaaacaattcacaccatatcactatacttccatcggaacttccatgagaagaatctctgtgttttccgatgtggattttatgtttaattcggaaatatcccaaattccgaagccgtctctttcttccagtttctgtccttcaatttctgcgcttcctttgatgataaagacgtagatgccgtttccttttttctttatctgatattgggtttcagccgtattttcaaaatctccgagatgaaaccatgcttcctgatgaatccatattccgtcgtcttgggggtcgggtgaaaggatttgctgaaatctgttttggcttttcgttctgtcgagtttcatctggtcgtatctcggcgtgacatttcttttatcgggatagacccagatttgcagaaatttaaccaaatcgccttcatctttactgaattcactgtgcattaatccggttccggcgctcatcacctgaatttcgccgccttttatttcgttatggtttcccagattgtcatgatggatcagggttccttccagtgcaatgctgatgatttccatattgtcgtgaggatgcgttccaaagcctttgccggcttcaacggtatcgtcatttagcactcttaaggcgccgaactgcattttttcggggtcataaaattctccgaagctgaaggtctttttactgatcagccactgttcgttggttacccctcttgaatctgcgcggtgcacgactctgttttcaggtttttttgctgctgcaaagctgttttccacctcgttgaatagcaatccgcttccgccaccgtaatgttctattacttttatattttcatcaaaatttctgcaaaaaacaccgatctgtttttcgaactgttcttccagaccggaactcagcaaaataatatcaacgggattgtttttgataaaatccttgctcttgctttcatcactcagaatttcagccttccatccatcatttttttcgataattctttgtaaggttgcaagaatttcgacattttttccgattaccaaaaagttcagtgttttcattttgattcaattaaaagttaatggtttacaattttaaaattttacagttcttctttaaaccatacatcgctgtattcgtcgggacggcgtttgaactgggcatgaacataaggacacagcggaacaattttgagctgattttctcttgcgtaggaaaccagtttttccagcaggatctttgcaaatcctctgccttcaaattcttcgtttacttctgtatgatacaccgttagtttatctttaatgacggaaatgtccattttccctgcttttttatcgtctgagaaaagctgaatctcccctcttacatttcctaaaacaacttctgttctttccatgattttgatttttaatgatgatgtaaaattaggcagcctgaatttgccggatcatgatgtatgataataaatcggttttattttgattaaactgaaagaagccggcaattattttttttaacttgatgaacataaattttctgtctttatcgctgtaatttttttgtttgcgaaggtgttacacgcagcggaggcttgattttcggaacatcaacaggaagtttaaagctattattcggctttttttgatcgaaattaaaggtgaattgatagtattttcaaaaattaaatcattaaaaatcaaaacattaaaaacaatagatcaatttatttactaaaaagtctacttttttagtggactaatagaaaaatatgttttatatttgcaaccgtaatcaggatataataatacaatgaaagcagaattcaagaacagcagcgtaagaaaacatatcaatcattttatgatgatgtattgctgtatgcctatgcttcattcctgttgtggttaaccttacttttatatgacatatttctaaaggctttaccacgttgtagagccttttttatttaaaaacaacattaaaaaatatcatgaatactaataaaaacaaatggctgattcctatagccttcaccaatatttatgtaatatggggaattactttcctcgccatttctttcgggttaaacggatttccgccttttattctttcggggttcagatttttgggcgcaggaataataatgatcggatatctgctcgtaaaaggtgaaaaagccaattctgccatcaactggaaaaaaaatgccatcaccggaattctcatccttacgggaggaacgggattggttgcgtggggagaacaatatgtaaccgcttctgaagcagccatcgctattgcaaccggaccattctggtttatcgccattgataagaaaaactggagttattatttctcggatnnnnnnnnnnnnnnnnnnnnnnnnnnnnnnnnnnnnnnnnnnnnnnnnnnnnnnnnnnnnnnnnnnnnnnnnnnnnnnnnnnnnnnnnnnnnnnnnnnnntctgccatatgcgcctattgtttttatccggaaaaaccatcggtaaatttcccgaactggataaatgcatagatggcaaggacaactaaatataattcaatattttagcgtcgagttcacgttaatatacaattcaaaatccgtcttaaataattataaagtccgttaaataaagacttcacacataatattagataaaacagcggcgtttaagttaaacaaccatttaaatattaatattatgaaaaagttagttttaacagcagcgtttacattagtcggagtaatcgcagtatcggctcaaacggtaacatcacaacaaaatccgtccacaaattctaataatccatcgaccactcagacccaacagaattcacaggcaaccaccaactgggaaacaaactccggaacgtcaagccaaaaccaaaatacgggaaccaatgccactgttgaatcagcaacacccgccacaacagcatccacagaaaccactgtaaatgccaatacagaacctgtaacagacaccaccaaatccacagaagctataaaagaagaaaagaaatccaagaagaaaaagtcgaagtaagtatttaaatttttaagaagtagaaagaagatcctgaaatgtaatgtttcaggatttttttatataaatatcaaacagtataatttatcttaaataattataaatcaagttaaaagaagtagaaacaataaaccttgtacgaaagttgcatttaacataatatcaaattttgaataaataattgatatgcaaataaagagaatcctgaatcatatttcaggattttttgtggtttatttcctctagtctgaactgaacaattttctttattaaattttcaggaagaccctcttttacaggaaactgtaccgctccttttgaaaatttataattgctttttttaaattcactttcgaatctttttattccttctgctccgggataaaagccaatatgttttttataccctgcaaaatacaccaacggcttatttttatatctgaaagcaggcatctgatagccaatatactcttcaatttcagaattttgcaaaagaatcagttttctgagattttctaatttatctttaatttcaggaaacagagcaatatattcatcaatattttcaaatgtatttttcatgaattaaatgtaatgatttttcactttttggcagttcttattttcattcggaacgaagcgtagcgaagtgaagaatctatctttggttgaaacgttatagatttctcttatgtcgaaatgacatgatgttaatttcatttgaattaaaatgattatcattagctgaatgaaatgcctttacgaccgaaaaatattcagcatcattcgaaaacaggaccttgctaatgtagcgttgaaaataaaaaagcgctgaataatcaacgctttctcctttcactttttacttttttcccatttataatcccgggaacaggttatatgaaaaaaggtcgggaatttcccaacctttgtattttatactactccctgagctaacattgcttcagcaactttcacgaatccggcgatattggcaccttttacgtagtttacatagccgtcttcttcttttccgtagtctctgcacgctttgtgaattccgatcatgatctctttcagtcttgcatcaacctcttcagaagtccagttcagacggatcgagttttgcgtcatttcaagacctgaagttgcaacacctcctgcgttagaagctttccccggagagaacaatactttattgtctaagaaatagttgattgcatcaagtgttgaaggcatatttgctgcttctgttacacaaacacatccgttttccaccaataatttagcatcgtcaagatctaattcgttttgagttgcagaagggatagcaacatcacacttcacttcccaaggacgttttcctgcaaagaattctgcagaagggtatttcttcacgtaatcttcagctctgttgtttcctgaagatcttaattccaacagataatcgatcttatcgccgtcgattccgtctttatcatatacataaccgtccggtccggaaatcgttacaactttcccaccaagttcagagatttttttaataactccccaagctacgtttccaaaacctgaaaccgttactgttttatctttgaaagtctgtccgattgttttaagcatctgctctgcgaagtaaacaacaccgtatcctgtagcttcaggacggattaatgaacctccgtacgcaagaccttttcctgtaagaactcccgtaaactcgtttctgattttcttatactgcccgaataaatatccgatctctcttgctcctactccgatgtctcctgcaggaacgtctgtttcaggaccaatgtgtttgcacatttccgtcatgaaagcctggcagaaacgcattacttccatatcggattttccttgcggatcaaagtctgaacctccttttccacctcccatcggaagcgtagttaaagagtttttaaatacctgctcgaacgctaaaaatttaagaacagaaaggtttacggtaggatggaaacggattcctcctttgtaaggcccgatcgcagaattcatctggattctgaaccctctgtttacctggatttctcctttatcgtcaacccatggaactctgaagatgataattctttcagcttccgccattctttcaagaagcttcattcccgtatattcctttttcgttaagataaacggaattacagttaccgcaacttcttttactgcttgtaaaaattctggctcattagggttttttgcctcaatttttgctataaattcttggattttctggtcaatattatattgttccatatattagggttgaatattattgccaacaaatttaatttttttttcaagattcacaacaccctaaataacaattgttgaaaatttaataatataatgacttaatattattaaatcagcaattcaatcattaattttattaaaaattaaatgttatgtttaaaataatgcaatattaagaaatcgttaattgtcaggttgctaaaaattgtctccccgaaagtgattttaccttccccaaaagttccaattctaaaataaccggtaaaattttgtgtgaggaaaggtctgttttatcagcaagatcgtccagagaaatgtatggattttcagatattattttaactatttcattttgattttcagttaattggattgaaatttcactatgaggaaataattctcctgttctgccctccggattattaaatcctaaattttcaaccagatcttttaccgtggaaatgaccgaagctttgttctgaaaaatcagatgattacaaccttggctctgtttatctgtaatctttccgggaagcgcaaatacttcgcggttatattgattggcaaacgttgctgtactgattgaaccgcctccaaaagctgtttccaccacaattgtcgcaggagaaattccggcaacaattctgtttctctgaataaaattttcgcggtccggctttttggatgaattgaattctgtaaataaagctcctccttcttcaagaattttttcggataattttttattttttgaaggatacaatgtgtggaaaccatgcgctaaaaccgcaaccgtagaaacctgatgatgaagagactgctcatgaacttctttatctactcccaaagccagaccgctcacagaaataaaattacaggacaacgtttccttaaaaaaatattcaataaactgttttccgtaggaagtcatatttcttgttccgaccatgcttatttttggtttagcatcatcaaaatgtcctttttggtaaagaattacaggagcatcatcacattcgtttaagagtttaggaagatcgtggagatgtcttagatgaattttgatctgattagtctcacaaaacttcagttcgttttcagcaaacttcaaatgagcaggatttccgatgtctgaaattattttagaaccgaatccgtccagctttttgtattcctttttggtgttttcccaggcatttttggcacttccgaaaatacggacaagcttataaaaattaatatctccgattaaattacactcgcgcagagcaatggaataaagatgttcttcagaatacatttgtgttgttttcacaaatgtagaaaatttttaaaattatttacctctcagttcatccagtctttcccagatatcgtctttctttttgtaaggcagctccataaaatcttcaggatggttttctttgtattcctgccagagtttatcatctttttcactgtaataatttggaaattcccagatgaattttttctttttatcgcctactttcttaaataaaagagccagaattactcccacaattccacctgcaagatgcgcctgccatgaaattttgctgggttcctgaagattggagaaaagttcttcgggaagcattccccagatcagacttccatagtacagaacgaccaacagagagatcgtgagcagtttcatattccatttaaaaaccccgctgaaaaaaaggaaaaacgcaagaacatagactactccactcgctccgatggtacaggtataaagataatctcccgtcatgatatctattggcggaagaagccaaaccagaaatcctgtagcgagccagcccgtgataaacactttattggcaaccaaaggataaaactgatacagtaaaaacataagcaccgcgatcgggatagagtttcccacaatatgttctagattgccgtgtaaaagcggtgacgttataattcccaataagccttccggcaacaatggaatgatcgccccgaaacagctctgaaaaaagccctgcatctgtaaaaagaaacccagccacattgcagcaagcataagcaaaggataaagcagcgcttttttggaaattatattattttttaacatgaagattctacgtcaaatgaaaagccaacgataaatttcggaaaatttgtcgatgaaaaatctgttcgaaaatttatttcagacaaaaagtaatgattttcactgcttttatacaaaagctctctgttttgtcattgaaatttaaaaagtaaaggctgaaaaccattcttaaaactgaatttccttctataaaatttatatttaatatttttgtaaggaattttgtataatgaaatcctgaactcatgaagaagtttttattcacactctctctttctctgggaattttcgccaatgcacaggttgttattacagacaccgcagccattaaagtagataccattaaacactggtcggttttaggaaaacagtcgctgatgattaatcaggccgctttctcaaactgggtcggcggaggagccaacaatgtgggatggcttgctgcgctggattataacatcacgtatgaaaaagataaagatctttgggaaaacatcattcttttgaattacggacaaaatgatacgaaaggagttggtgtaagaaaaacgcaggacgttattaatgtttccactaattacggaagaaagttttcaaaaagctggtatctttctgtaggagcgggtcttatttctcagttttctgcgggatatgaggacggaaataatccggaagcaaaaaaaatatccaattttatggctcccggttatctgaatgtcgggatggggatcacctacagacccaatgacaatattaatgttacccttcgtccgagcaacgcgagatgggcttttgtgttggatagagatcttcagcttgcaggaaattacggtttgaaagccgatggcgattcatcaattttacaatatggttttctgggaacagcctattataaatttaatctgatggagaacgttaatattaccaatacggcatccgttttctccaattatctggatcatccggaaagactggttttggcgtatgggatgatcttaaatttaaaggttaataaatttatatcgtccaatataacagtggatgtaatgtacgaccacaatcaggttcagaaaacacagctgaaacaaacgttgggagttggttttgcctatactttaaacaacggcgtaaaacgttccgacagaaaggacagccaatggtggatcaaaaagtaaccgtcatattcatacatcaaaaagagccggatctaagatccgaccccttgcaaacttaaattgaactataactgtgtaaaaattccggatactttaaattaaaattcagaatcttttcacagtttgtagcataaaatttaaaatgttacaaaaaattctcgatgtaaaatcgcttctgaaaagtcagaaaagttcctgtaacattttttcttttttcctactaactcggcgagtaaaataaaatttttcattatcatttatgtgtttttagcaaccttctattctttttaggaggttttttgttatacattcaggatgttgttaaaaaataaaacatgatgatctttaacgaaaatcgaatgaaataattcttaagtttcaggattttaatacatttgttaaaacatatttaaaagatgaatttcgaacaggttgctttacatttagaagcttacagggaacacgaccagattattgatgcagcagaatacattatccgctccttcaatctcgaacatgaaaatttcgaaggatttggtcttcgcgatgaggttttcccgaattctctcgtcttaacagcagaaggtgttttaggaagcccgcaaaaagtaatgatccctaaaaatttattcgattttgatctgaatctggttttaaatttaattgcccacgaaatgctgcatgtacggcagaaagctccgggacacgttattcaagataaaagcgaaagggaatttcaggcatattatgaaatgctttttcataaggtttttcctcagattcctgatgtatccgatttttataaaaaagatttcggcagcaaagcacttgaatattataaaagaatgggcgaaggttctgaactgcagaaaaagtatgctgaacagaaacttgaagtagaacaattaatcaacacattatcatgattgtaaaacccgaaatttcgtgggaagatttcgaaaaaatagacatccgatgcggaaccattgtttctgtgaacgattttgagaaagcaagaaatccatcttatcagctagaaatagattttggagatttaggcattaaaaaatcatccgctcaaattacttcattatataagaaggaagaactgatcggtcagcagattttggctgtggtaaattttcctaagaagcagatcgccaattttttcagcgaatgtctggttttgggcgtttatggagaagataaaaaagatgttacccttttaaccccttcattgccggcaaagaacggaatgcaggtaggataagttttaaagacatctgtgaatacaggaaacctcacaggtttttgaaacctgtgaggtttagtttctaacaaattattacgaagaataaaaaatgatacagcatatccctttagaaagagttttatttcttgatattgaaacggttccgggatttggattgtgggaagaactctctgaaaccgaacagatgctttgggataaaaaaacgagattccaaagaaaagatgaggtttctccgggagaattttatgtggaaagagccggaattatggcagaattcgggaaaatcatctgcattaccatcggaatgatcgaaaaaaacgatacgctgaagatcaaaagctttgcgggtgatgatgaaaagaagctgcttctggaatttggcgaaatttttaacagcccgagacttcgcgacgtcattttatgcgcacataacggaaaagaattcgattttccgtggattgccagaagatatttaatcaacggaatgatgcctcctactccgtttcagatgttcggaaaaaagccttgggaaattccgcatatcgatacgatggaactctggaaattcggggattacaaaagttttgtgtctctggaactgctggctcatgttttcggaattcccaccccaaaagatgatattgacggctcaatggtttcatcaatctactacatagagaaagacttgcaaagaatagttgactattgtgaaaaagatgtcttaactttggcgaatgttttccggcgcatgcgtcaggaagatttgttgaaaaggtacatcaatttagattaaaaaatgaaatttacagacgatcagattgctgacatcggtgaggaaatcatcggtgttttaaaaaccgtgtatgaccctgaaattccggtagatatctacgaacttgggttggtttatgatgttcagatctccgatgaagcggacgtaaaaattatcatgacattaacaacgcctaactgtccggttgcagaaacgcttccgcaggaggtaaaagataaggttgcagaagtggaaaatgtaaaaagtgtagacttagagcttacctttgaaccaagctggaacaaagatatgatgagtgaggaagccaaatttgagcttggaatgctttaaaatttaatttcttcaaatcatttttttccataaaaataatgagctgtttcattttgaagcagctttttttattttccgttttttccccatatacatttcgtgaaatccctaacacacagaatatgaatctgatataattttgttttcagaaatcaacagtatgaaagccaataccatcatcgtatcattcaataatggaagtgttccgccacagtatgcttaccgatatcagattatattttccgaacaggacggaaatgccgagctgaaaatcttcagaggttacgaaacggatgaaaaaatgattgtatctgagcaaagaaaattcaacacagaaatttttcttcagcttctttctttaatcagcaaaataaaagattctgtaaaagatcctttaatggtaggaggaagccagagaatgattgaggtgaattcaaaaaaaatcgagatccatccggatgatgatttcggaatttctctgttcaatcggtttttatatctgtacaatcccgatttcatcaaccaaattaattctaaccttaacctttaaaaaccaattatcatggaccaagcacctaaagaactgtttgtaggagttattaatccttatgcactaactgaagctatcacaggaagaaaattcgactggaaagacgcaaaatcgtaccagattcttgaagaaactctggaaaccaactatgcagaactgtttgacatcaaatttaattctcctttgtatgccggactgcagcttaacagcgacaacactgtaagagttatgaaatctgatgatattaaagtaagagctgcagataagctggaaactgtaaatctttcgaatattaaaacactcaatgatctttcaggtaccggaataaaagacctgagcagcatcgctgtaaaaaatgccagattagacaaaggcgatgtaaaagtggtactgaatatcccaaagctgaacaacactatcagcaataaagtactctccccttctattaaaaatatcattttcgggatgggaaatgcaaacggatggactcctgcaggaacttcatggagcgacagaggaaatttcttcaacgacgtgacggagtataatgacccgattcagggtgcagtagccaactgttattttattgctgccatttctgctattgcatgggcagatccttatactattcaacataaagtgagagctaccggaacgggagaaacagaccgcaccaacgccatccagtttttcacaaaaggcggaggaaaagatgcggcaacaagacttgtggaagttactgataatacgatcattaactcttccaacaacaatcctgtatattgcagaagcaacgatgcgggagaaatctggccggctgtttacgaaaaagcctttgccaaatggatcacgaatgtaaatgacgataaaccggatatttctaaaacggctttcggagatcctgcaaaagctgttgcacaacttacgaacaaaacaccgtattattactacacttcaccaagaactgcgcttgatcttttcggcgtagtaagagaaaactcaatgagctgcaagaccattaatccgatggttgcatggacgtacggatcaggaaaagattataccggatctaatatcgttggaaatcacgcttatacggttttaggatggtctactttcaatggaaagaactacatcatcctgagaaatccgtggggagttaccgaaccgaatggtttgaattcttatcagggacttatcagctttttcgacggaagcttctggagaccgattaacatgattggaaacgacggcgttttcgcactggaaatcaattcctttaaaaattattttgaagctttagctgttacaaaatagagaaaaattcacctttttattaaccaacccttcacttcagctttcacagatttcggtctgtggaagcttttataattctgtggcaatttctttcccttctcttctgctccactcgctccatgatcctacatacagattcgggattttgaatcctgcgtaatccaaagccagaatagtatgacaggccgttactccggaaccacaatgaatgatcagattttcgggctttccttcaagcaattttgaatatttttctcttaaaatttccggtgaaaggaagtttcccttttcatcaagattttcagaaaaaggaatattaattgctccgggaatatgtcctgcaaggagatcaatcggctcagattcgcctctgtaacggtatgaatctcttacatctataaccgtcgatgattgttttgttaattcattttcaacagcttccagatctgagacaggaagaagccacctttctttatgaatcaggtcagctttttcgaaagattcttcgccggacgaaaattcaaccccttttttttcagcattctgaaatccgccatccagaacctgaacgttttcaaaaccgaaagctttcagcatccaccaagttcttgcagcagcgtttgatccgtttttatcatcgtaaataacaatatggttattttctgaaattcccagatttgaaattgtctctgcaaattttttaatttccggaagcggatgtcttcctccaaaagcagcgttctcaccgatttcagcaagatctttatccagatcaataaatctcgctcctttaatatgtttattcagataattttgataaacatcttttcctgctcttgcatcaagaatgataagattttctgttggaagattttttagttctgaaggtgagataatggattgcatatttgttttttaattatgttcgaaagaagcagcaactctgtatttattattaagaacgtccgtaattttctttctcagatcttccaaagtaaaactggcatctttaaaaccgattggataagtggaatgtccgcttttcgtttcttcacaaatgacgaattgcggatctgttttttctatctgaaccgttttttcaattttgaatttacgctccactttgtctcctttttcattaattaaatacaaaacatacaaaggctgaagcatctcttttggcttttcaaaatatttatggatgttcacaacctggtttttccagtcgaactgatccacattaagatttttgaacttcatttcatcctccggaagctctttattttcataaaaagttctcattttctcaaaataggaatctgcctctgaaaatttattctgaacatttaaagattttatcagcttggtatacagttcatattcttttggtaatgatgccaaagcttctttatagattttctcagactttgcatactctttctgagtataatagaagccacccgcaaataaaactatttttacataccagttatctttctgacgagatttctgaagggcttccaaaaatgttttttcctgattaacagaatcttctctgatgctgtaaatccgtaatttttcataataaaattccgccaaaggatcagactccaaacctgtatttatatttttcagagcctcatcatactttttctgatacatttgggacagaccgatgtgataatacacgagatcattatcaaaacctttttttaaagctttgttgtaatattctattgctttgtcgtcattttcctccctgaaaaaagcaaatcccaaatagtaaagttcttctcctgtaaaagaaggactttcattttcaagcccggttaattccttaaatttttcttcgttgaacagtttttctactttctgggcaaaaaccgcagaagaaaaaacaatcagtatggcgacaaaaagcttagtcatacctcaaaaatgaaaaatatctttcgctttgttgtaagaactttcgaagttcagcagattgagtttatggtctgctttttctacgctcataaaattgattacctgttcggtcggcatatttcccaccagatcatcttttgccatcggacagcctccgattcctttgatcgcactgtcgaatcttgtacatccctgatcgtaagcggctttcagcttagcgtaagaatcttcgtaacggttatggaaatgtgctccgaaatttatttcaggatattttgaaggaatttttccaaacaaaagagaaatggtttccggcgttgcaactcccgtagtatcagaaagtaagatttctttaactccgatttcagaaaatcgctgagcccagaaatccacatcttcccacttccacatttcgccgtaaggatttccaaaagccattgaaaaataaatatttagctgcctgttttcattttttaccagttccagcattttaacaatctcctgaaaagcttcttcctgatttttattcgtatttctatgctgaaaagtttcggaaatggaaaacggaaagccgataatgtctaccgactgatgttttaatgctttttcagctcctctgtaattggcgacaattgcagaaactttggtattggatcgggatttatcgatattttccgccacctcatcagaatctgccatttgcggaattgctttcggagaaacaaaactcagacagtccagaacatcaaaacccacatccataagagaattgatgtaatctatttttttatcagtcgggatgaattctccccacccctgcattgcatcacgcggacattctgtaagaaacattttttacatttagattttctcaaatataataaaactaaacaagttcttaagagttatgcaaaaacacaataaacaactgaatttcattattttacacaaataaaaacacttcacagaacgattatggagtacaaataagatattctgagcatcaaatttgctaactttacaggaaatttataccaatataatgagcgcaatagaattcagccctttgtggaaagaaaagctactgaaccgttttcttaattacgtaaaaatctattcaaccagcgacgcagaaagtgaaaccactccttctacagaaagacagtggaatatcgccaactacatcacggaagaactgaaaacgataggtcttgaaaatgtatcgatcgatgaaaatggttatatcatgggatacgttccttctaatcttgagaataacgacaaaccaaccatcggatttatttcgcattacgatacttctccggatttcagcggagagaatgtaaaaccgcaggtttgggaagattatgacggaggagatctggttttgaatcagacaacaggatttactttatccccttcaaaatttgaaagtttaaaaaaatatatcggtcagaccttaattaccacagacggaaatacccttcttggagccgatgataaagcaggctgtgcagaaattgtaacggctgcggaatatttaatggctcatccggaaatcaagcacggaagaattgccgttggatttactccggatgaagaaatcggaagaggagcgcataagtttgatgtggcaaaattcggggctgaatttgcctacacgatggatggcggagaagttggtgaactggaatatgaaaacttcaacgcggctggagcagtggtaaaaatccacggtttgagcgttcatccgggttatgcgtacggaaaaatggttaacgcggctttactggcttctgaatttgcacagatgcttcctgccaatgaaacgcctgcaacgactaaaggttttgacggtttttatcatttaatggacttaaatgcagatatttctgaggctaaattgcaatacatcatccgtgatcatgacgctgataaatttgaggcaagaaagaaattcatggaagaaaaagtagctgaatttaacaaaaagcacggtgaaggaactgccgaaattgaaattaaagagcagtacagaaacatgaagcagcagtttgaaggaaaaatgcacatcgtagatcttgccgcagcagcaatgaaagaagcaggaatcgaaccaaagattaaagcaatccgcggaggaaccgacggagcgcaattgtcttatatgggacttccttgtccgaatatttttgcaggaggaatcaatttccatgggccatatgaatatgtggctctggaaagtatggagaaagcaatggaagtgatcctgaatattgcgaaggcttaaaaaattctaatttatataactaatccggctttgttgagccggattttttataacatctttagcaaatctttccttacatgctccaaatcttgaaaaattctctcaaccttcatttaccaactaaaatttctttcaacataagtattttcaaaaagattccagggaatactgtctgcattttttagaattatattgttcttcttatgaacaaaaatttttattaattctcccgcatgatgatacccgtttaaaacaatagtatgaatgaattccgaacccagaagacttaaatattttttaaatttatcctctttttcatcctcaaggaatgttaaatctaaatcatcaaaaattaccgtgtgatcaactatgatttgggctaaatgttttgcgttattaaaagctgtaaaactcttgaacatttttcctgtagaattaacatcagactctagaacatccaaatacactttccgtcctgaatttaaatgataatctttttgatattgctttatcccctgtggaatttctatttcgtgtctcctgaaagctcttttccattcatctattttagacagaatattatcctccgaatatgaccatagaaatgaatacatctttttgtctttttcaaaataatcatcaatatacagatcttcattccgatcataaaaaatccaggaggtcgtatagttgaaaaggattgattcatctaaaattttagataaaaaataatttttctcatcaataaagaatctcatttgtatatcatttgattgttgcaaattaaacaaaaaaaccactacaaaagcagtagtctcacaacatttaaattcccttcacaatacaaatttttgcttataatgtttccttgatccattgatacaaaattattctgaaatttttatacattattggtctgatttttgttgaaaaatcaaaaaaaaccatttttataaatgaaaaagagattatattcagcagcagtgattcttttatttggaatcggagtatctgcacaaaaaacaaattctgtaaagcaggaggtaaaaaaagatgctaaagccgtaggtaaggctgccaaagacggcgcagaatggaccggcaaaaccgcagaaaaaggttatgatgcaaccaaaaaaggcgttaaaaatgcagcaaaatggaccaaaaaaacggctaaaaaaggtgcggatgcggtagacaaatcctaccagaatgtaaaagcagacattaagaaagattaattacaaaaaaaccaccgctattgcagtggttttttaatatctaaacagtaaaattatctatccttgctgatttcccaaaaaagcgtcccaaccctgcgctgttaaagcaaccaactgattagaacctcttgccaccataaaatttccgtcttctttttcaacgacatgaccaatgatggtaaaatccggatggtttttaattttatcaaaatcattcggtgaaatcgtgaataataattcgtaatcctcccctccgcttaaagcagccatcacaggatttaaattgaattcatccgctgttgtaatcgtcaaattatccatcggaattttttcttcatacaatctgaatcctactttcgactgatctgaaaggtgaagaatttcagaagccagaccatcagaaacatcaatcatagaagttggtttaatatccagttgttctaaaattccttttacgtcggttcttgcttcgggcttcaactgtctttccagaatataatcgtagccttccatttccggctgcatattcggatcggctaagaaaacagcgtgttctctttccagaatctgaagtcccatataagcgccgcctaaatctccggttactaccaaaagatcgtttggttttgccgtacttcttttcacaatatgttcatcattctccatcccgattgccgtaatgctcattaccaaaccggcattggaacttgttgtatctccgccaattaagtcaactttatatcttgcgcaagcagtctgaattccggaatagatttcttccagagcttccaccggaaaacgattggaaacggcaagagaaaccaaaatctgagttggcgttgcattcatcgctgcaatatcgctgagatttacaacaaccgctttatagcctaagtgtttcaaaggcacatatcccagattgaaatgaacaccctccgccaaaacatctgttgtaagaaccactttcttatttccgggattaattactgccgcatcatctcccactccaagctccgaagattcattggatagaggaaaatgctccgttaaatgtttaattaaaccaaattctcccagtttggaaattggcgttaattctggatctttatcttcaaacatatttttaattataagtaataaataatgggtaatgagtaattttaaaacaataaactcaaaaccttacatcttaaacagtaaatactgccggatcaacattttccggacggaaaggaagttttttgaaatcttctcttgttaaaattatcgtttccggagatttatatttgttcatagcttccaccacatcatcgggcggcgttgtcatttttctcagcatcatatcgatccagactccggttgcttctgcagtggcacaatgttctccgtcggttgtgtaaaatttatgtacaaaacggtaaatagaacagtcttctgcacagccatcaatttcaagacttaccacgaccgtctgatctgcaaatatttctttgaaaaaagaaaatctttcatgcatgattaccggaccgattccccatcggctcatttgggtaacgcccattttttcctgcttcataaaagccattctggtttgcgcacaatattgtacgtaagatgaatttgccagatgtttgttggcatcaagatcgctccagcgaacttcaaatgtatggtagaatttcatttactttttgttttaaaatataaattgtatgattttttatcacaaaaaccatttttggcagtcaataatttcactgtaaaaatgaaaaattatattcctcaaaattactcaaataagatggtttataaaaattgtagttttgcaaaagtaatcttgagcataagattgaaagaattatgaagcaaattatcattatcggaggtggcgcggcaggatttttctgtgcagccaatctggacgaaacaaaatataaaattaccattcttgagcagaattcggatgttcttcagaaagtgaaaatttcgggaggaggacgctgtaatgtgactcatgcctgttttgaccccagagaactggtacagttttatccccgcggaaacaaggaattgctgagtgttttcaccaagtttcagccgggagatacgatggattggtttgagcagagaaatgtgccgttaaaaatagaaaatgacaaccgtgtttttccggaaagcaattcttcgcagacgatcatcaatacttttttacatgaaattcagcagaaaaatgttgaagtgaaaaccaaatgctctgtaaaggaaattcaaaaatcggacgaaaaatatattattagaaccagtttaggtgattttgaagctgattttataatttatacaaccggaagctcgccaaaatctttgaaaatgatcgaaaatttaggtcataaaattattgatctggttccgtcgctttttacttttaacattaaagatgatttgctgaaagatttagccggaacaagctttgaaatggcggaaacttccattccgaaactgaaaaccgaagaaagcggacctttacttattacccactggggactttcaggacctgtcattctgaaaatttcagcttgggaagcgatcaatctggcgaaagtaaaatacaattttgaaattgaggtaaattttatctcaaaagatattgatgatgcggaagaattatttctaaacttcaaacaatcgaatccaaagaaaaccatcggacagtcgaaaatatttgatattaccaatcgattctggcagagaattctggaagtttcaaaagtggatctgaataaacaggttgcccagatttcaggaaaagaaatgcagaccattcttgaaaatctatgtaaaaagaaatttaacgtcgccggaaaatcgacttttaaagatgaatttgtaacggcgggaggcgttgatttaaaggaaattaactttaaaaacctgtcttcgaaaattttgcctaacttttacgttgccggagaagtgctgaatattgatgcggtaaccggcggatttaattttcaggcgtgttggagtgaatcgtggctgattgcgcaggatttgaatctgaaataataatttaaacacaaattgcacgaatctttttttcactaattacacaaattatttgtgaccatttgcgagaaattagtgatattcgtgtttaaatacaaaaaatgctttccgtcaaaaaaaatatttcgaacacctttaaaatccttttgatgatcgggtttggatatttcttttggctgatgctgaaaattacgctagaatatattccgttgcgctctgatgtgagttttttaatgatcaaacagacggaagttaccaacagaccggaatatctttattttttctacactcacgtctacacaagtatttttgttttgctgactggatttttagcgattctcagaaaagatttcggcataaaaagtttccacaaaaacacaggaaagatgtacatttttctgattttgcttttcgcggctccgtctggaatttatatgggaatttttgccaacggcggaattttatcgaaggtttcctttgtcattctcggctgtttgtggtggttttccacttttaaagcgtatcagttagcacgacagaaaaaatttaaagaacataaacaatggatgtggcgtagttttgcgctgacactttccgcggtaacattaagaatgtggaaggtaattattgtatatttattccacccgaatccaatggatgtttatcagatcatagcatggttgggctggattccgaatatcttattaattgaatatttaattgcaaaaaaatacatatgaaaattttaaaattatcgttaatctctttatttacattaggtttaaccgcctgtaaaaaagatgtaaaaacaacagatccttcaaaagacagtcttatgacaaagaaggattctgtagttgttcctgaagtttacaaagaatattacggaatttatatgggcgattttgcaggaaaaggaatgattacctccgaagacggcgaaacgtatgaaggtgaaatttataaaagaattgccctgaaaatcaaccggattaccaaagacagtgtatacggacaaagtattgttgatggaaatcaaagaccattcagaggcgtttttaacgaaacttcaaaatcctttattctggatgaacccggaaatgataaaacagacggaagattcgaggtaaaattgaacaacgacagtcttaccggaagctggaatgccttcaataaatcggcggtaaaggctccgaataaggttttaaaacttgtgaaaaaagagtttgtatacaacccgaatttcatgctgaatgaaaacaatgacctcatcgattgggaaaatccgaaggatttcgtagaaaaatacaccgacgaagaaaccggaaaaacggaaacctacaccgaatccagaaacagaattgcttcagatgctgtttttaaaatcaatgcctccaagcagaaattaacggaaaaagaccttaaaaacctccgaaaactggatatggaaatcattaaaaacgctgttttcgcgagacacggctatgcttttaagaagcaaacgtaccgaaatttctttgagcagaccgactggtacattccggtttccaataacgtagacagcgagctttctcctcttgaaaaggaaaatgtagctttactgaaccgcttcatcaaatacgctgaagataaatacgacagtttcggaaggtagtttaatgtgttgtttgaggatttttctgaaatttaacaaaaacaaaaagcaataaacatccaacgaagtagcacaaaatatcaatccacgaaaacgaatttccgatcacgatatacatcaggcttcctttccggaagcctaatttttcagcaatattgaaatattgagcaacttctaccagaaaagaaaaaatcaggatactgagaatcaattttttattatcttcaattctgaaaaatgttttgatgaaagtatagatcagcatcacaacaatcacatctccgagatacgctctcacaaagaaaatgtttttgagtttggtggcgattaaaacttccgtcagaaatataaaaacggtagccagaaaatatgtataattaaatgtaaaccgaaatgccaattcttttccttccacttgtagtgctttttatgtattatgtaggttttataacccttacaaaattaaaaataaagcagattgataatgacaccaaaactcattttctgagatttttttcagggtttatcgtgatggctcttctttctttattgattttactgataagatggatcatcacaccacatcaacccaatgattttcactgatccttattaaaaacccaattttcattcggctttatttttgatgctttaaaaatattatttctcataacacaattatatgaaaaagctgattatttttctgggcttatggttaagtttctcattatctgcacaaaccaagcagtataattcagtaaaagaacttccggattacgcagttctaaggacgaaaatgaagcttgatgatgtctataccaaggcagatactccggcggaatttcccggtggaatggaaacgttcaaaagggaattttcagagaaaatggacgttatcgatgtaaaatcaaaaaaaataaacacccgagtttatttgattgtcgaaaaaacaggctatgtaagatatgtaactgcattaggagacgatccgaaacactccaaagccgcagaaattgctgtaagaagactttttgtaaagtggaaacctgcaacaatcaaaggggaaccggtaagatttctttatacttttccgcttactttgaagaaatttgattaagtttcaatatgaaaattttcattcataactttgagttaaaacgatggctggttttatttctgatgattaatttcggcgccttgcttttcgcacaaagcagccatattcctgctccattccaaccaaaagaaattgaaaaaatcccaattccgataatatgttaacgtgaactcgacgctaaaatattgaattatatttagttgtccttggcatctatgcatttatccagttcgggaaatttaccgatggtttttccgggtaaaaacaataggcgcatatggcagannnnnnnnnnnnnnnnnnnnnnnnnnnnnnnnnnnnnnnnnnnnnnnnnnnnnnnnnnnnnnnnnnnnnnnnnnnnnnnnnnnnnnnnnnnnnnnnnnnnaatcaaaaaaacaacttcccaataaaataaaaagcttattacggatttttaaatcttgtaataagctcttatttttcatcctaaataaataggctgtcgtaagatgcaaggtttttcagtgacctcgcaattgcggtgggttttgttatttagtgaacgcctgtttcgttttaaaattttggataatgttatccacgagaaagaacagatgttttttagtttcaggatcaagcttgtcgatatcttcaatgcgcttcattacttctttatcataagaagaaatctcgccttccccaattaaataatctaccgttacattaaaggttcttgccattttcatcagtacttcaatagaaggagtatttgcattccgttcgtagttcccgaagatggttctggaaacttcaatccttttggcaagatcttcctgcgaaatattaaaaagaaatgtcatgagtctttacagaatattgattttggagtctaagaatacaacatccaaattaagaatcatttgaatttgacagaattctaacaaagttcttataaactcgttccccaaaaatattagaaataaataacgataaaacctctatttattagccaaccccgtattttcccctaatcagaacccgtgatgcaataaaaacagcaaacggtgataaaaccgtactgtaattggtgatttttaaaatttaccattttattgtggttcgcggagttgctgtagagtctacctttgtcttactattaaccaattaatttttataatatgaaaaacttagttacaggcgtatttacattaatggccatgggattcacatttgcacaggcaaatatggatatgagtactcaaaacggaaacatgaacgttgctacagtagaccagacaggtctgatgaacgtaaatcaattgaatcaggatggtaacagaaacactgcggatattgatcaggtgggaattttaaacaccaatgaggcagaaagcttaggaaaccgaaatgctgtagacgtagagcagactggtgtcggaaattcaaatcttacaagccagactggaaatcgtaacgaagccacaacttggcaggtaggtatgctgaattctacacagcagacacagctcggaactagaaatgaaacatcttctacacagtgggggaatatgaataccgctgttcagtatcaggacggagaaaggaatgatgcttcctctttccagtgggggaatagcaatgctgctacccagatccagttagggcagagaaacgaagcctcttccactcaggtaggtgatgagaacactttgctgcaatatcagcagggtaatgataacagtgctgcaaatattcagacaggcgataacaacattgctgcagccttccaggtgggagacgataatatggcaatgggaacccagacaggagacgacaacctgttggttcaactgcagatcggtgatggaaacagcgctatgaatacacagtccggtgacggaaatctggcggcggtaagccaaagcggagacgcacacattcacataggaaatcaaataggaaacaataattctttaatggttaatcaatcaaattagtacttctgtaatctgaagtttgggagagacgacagtctctccttttttattttttagccgtagtttataatccgtgtttatacgtaactgtaagcagtgattttgacggattaccaattatacgtgttttatagcaagttacattagactaactttatcaaaattaataatcatgtttactctaaaatgggttttctttacaatgttcttcttcatatctgtaaaatctcaacagatagattgggacaggattaacagcaataatgttttcagcattatcgctgtacagaatcaggatcttgtggcttcctcggatattattcagatgggtaatggtaatcatgcagagctttccatcaatgctaaaacagatattgcggtaagacagtcgggagattataatacgctttattttgtgaattcattttcggaagcagaaacaaaaactgcaattacaactcaaggtaataacaatattattgatatcacaggaagcaacaggatatccgaaggtttgcagatccacgtaaaaggcgataacaaaaccatcttcatgaggaattattaaaaataggatgatgaaaaacaggtttccccttattttgtgtacttttcttatccttctgtcacacaccactttcagtcaggaggataaaaaagtcactgcaaagatagaaagcagaattgtggaagatcagattcaactcaaagcagtggttgccaacaacactccaatctatgcagaactcaattatcttctcatttcaataaaaaaaggaaacgggggaaatctttctaacaacaagcagaacggtaaattttctatcaatcctaatgaagtaaaggttttgtctgaaataaatgtaaaccttgagaaaaaagatgctttaaaagcttttctttatgtaaaagatgaagaaacccagaagcttattgcgaaagacagtctcgaacttaatggagatttattcagaaaaaaaatagccggaatagaagaagatgttttttttgagttaaaaggtttaaccattgatgaaaccaaaagcaaagtaggaaaggacttctatgatatgttttacatgacttacagccagattaaagataaactgaatgccgctgtaaaaatctcagaacttcctgttcgcggaaccaacggacagatcaatattgaaattgaagacaaaattatatatagttttataaccaacccgggcgaagattacctgaaagaacaattggttgctgccttaaagtatataaaagaatttaatgctaaaaaaaatctgataaagaatgaattcatctattaataacatcagtcatgaaaactcttattattctactgagcatttttgcgggaattttctcaggaaaagcacaacagctcgtttacaagcctattaatcccgcttttggaggagatacgtttaattatcagtggcttttgagttcagcaaacgctcaaaatcagtttgatgataaaaaaagcaacagcttacttgataattttaattctctcgacagcttcagccagagccttaaccgtcaggttttgagtgaactgtccagaaaattatttgcagaccagttcggagaagaaactattcagccgggaaattacctgttcggctctatgtatttacagattaccgctaccgctcagggactgctgattaatattttggataccaaaactggcgatcagtccgagattgttattccaaaataaagaagattaccaattactaatttttttgaccatgagatccacaacctacaccagaatttttttctgggtaacgatgctgtgcattctgcaggcatgcagctctttgctcggattgccctccagtccggaaaagtctacgcttggcgaaaacacatcgtataccacagaacttaaaaatttacccttgcccaaagaaaaaatcgtgatcggagtatacaaattccgggatcagacagggcagtacaaacctgcagaaaacggaaataactggagtacagccgttccgcagggaaccacaaccattttaattaaagcattagaagacagcaaatggtttatcccgattgaaagagaaaatattgccaatcttttaaacgaaaggcagatcatccgttccacaaggcaggaataccttaaagatgccgataaaaacagtcaggcattgcctccgctcttatacgccggaattttactcgaaggcggcgttatttcctatgacagcaatattatgacgggcggattgggtgcacgatacttcggaatcggtgcttctacacagtacagacaggacaggattaccatttatcttcgtgccgtttccacattgaacggcgaaattcttaaaaccgtctatacttcaaaaaccattctttccacgagcgttaacggaagttttttcagatatatcgataccgaaagattgctggaagctgaagtcggtttaacgcagaacgagcctgttcagcttgccgttaccgaagctattgaaaaagcggtaaaagggttgatcgtagaaggaattaaagataagatctgggggaaatcagccgataatatcgagaattatcaggcaatactggatgaatatgacagagagcagagaaataatgtaaacagagcgatcggaaataaatttcagggcaattaccgaaagaattttgccgttttcggaaacgtagaagcacaaaaaattaaagacgattacgtaaatcccaaaatgaatattggcggaaaactgggctttaaatatttcatgaatcctaatttcaatcttgaattcaattcaaacgtatttacattagaaaatgaaaacattgtaaaaagaactttccttgttccggaaattaatatcgaatatctgcttttcccgaaatataaattcacaccctacatttacggtggagcaggagtgatgtattctgagatcaaacctcagtacaaagcacagtttggcggcggcttcgagtatatttttgctaaaaatgtaggattaagagcatcttctcagtacgatctgggttttaaagatcaatgggaggggcttatcaacgggcaaagaaaagatcaggcactgagattttcgctgggacttaatttttatatcggtaaccaataaaccctgaactatgaaaacaatacttaaaatattcagcatatttattttttccctgcttctgttttcctgcaatgaagagcttgtagatcaggcacagacaggaacactaaaaggaaaagtagtaaaaaggggaaccaatgccccgattgccaatgtgaagattttcacttctcccagcacacagactgtattttccgcagcagacggatcttttgaaattgcaggaatgcctatcggaaattattctgtaaaagcagaacttaccggctacgttaccaattatcaggcagttaatattcagaccaatgatcaggcagtaagtgtggtttttgaaatggatgacgacaaatctttaaattctcctcccacagctccggtattactcagtcctgttgataatgcggtaagccagcctttaagtgtagaacttacatggaacgcaagtgatccggataccaaagatgaacttaaatacagtttaacaattaaaaataatatcaatacaaatgttgttcaggtaaatgatttaacggtaaaacattacacgctttccaatcttaattacggagtaagctatttctggcaggtttctgtctcagacggaatccatcctccggtgatgagtgccatcggaaaatttaccaccagtacagttccaacgaacagatatcattatgttaaaaaactcaacgggaatcttgtgatcttttccagtgatgcttcaggaacaaattttcagtttaccagttcttctttcaacagttggcgtcctagaaaaaacaataattctgggctggttgcttttttaagaacagaaggcggaagcaatcatatttacactgcaaatcccgacggttccaatctttttaaagtgactacggttccggttgcaggtttcaggaatgatgagctggatttttcctggagtacaaacggacaggagtttttatatgcaaattttaataaattatacagaattaataaagacggaagcggtctgaatctcgtgtacaccacacccgatggcagcatgatttccgaatgcgactggagctacgacggatctaaaattgctttaaaaacaaatgattacagcggttacaattcaaaaatttatgtgattgatatgctgggaaatgttcttaaaaccgttctcacaggacttcccggagccagtggcggactgaatttttctgtagatgggcaaatgctgctttactctcgggatatttcaggatatcaggatacttccggaaattacagacaattggattcccatgtttttgtctataatctcacaacaaacacaaaccacgatatttcggcagaaagcgataagatgatgggaactaatgaccttgatcccagattttcgccgaacaatgctcaggtaattttcatgaatacttctaatgataacatctcccaacggaatgttatggttattgatctgaacagctcgatgacggatctcactagagctgttcttttcagtaacgcggaaatgccggattatgaatgatattgatgaggttgcttttttgtgaatagccaatgaattcacaggtacagaatggttagctgtcagtccttaattaccatttgtctgtgtcacaaaattggctgttcaccttttttaagagataacattttttgattttttcatggttcttaaaaggaaattccaaacccgtaagtttggaattttttttaatgaaaaattggagctgccgtttaatctataatatgattttccaatgcatattttacaactcctaccgaattttttacattcagtttaagaagaattctttttctgtgtgtttctaccgtgtttatacttatgaaaagtttttcagagatgtctttgctgctgagtccgtcgcagataagcttcaggatttccatttcgcgcctcgttaacggatcttttatttggtttttgcccgtgtcctgctcattgctgatgaagttaatcattctgtcttttgcatgattgcagacatagatttcattggaaagaagtgcttctatagattttataaattcatcgtagctgctgtttttatccagatagcttttgatgcctttgttgaataattttcggatatcgatcacgtcataatcgtttcctataataataatcttaatcgctttattttcggaggtaatattttccacagatttatatagttccgtaaaaatcagcatattagcactgatcatgagaaattccggcggatcgtccttcaaaagtatttttaatgcttccgggcagttgcaaatatcaattgttgtgaaaattccactttgttctaaaagttttgagagcccttccgtatacaacagaggctcgtcgaagatggttaatcttggtctcatcatgattagttttagtttatataaaaataagaaaaaacttaatatttatataaatataatcaaaaaatatctaattatatcaattaaattgttaaaataacatagttatttatgattatttgataaataattccctttggtttgatttttaagggctatttttagagttattgattataaatgcctttatttatcatatttctcaagggtctgttttaatttgaaaaattatttaactaacacttttgggatatgttttatcggaaaatttacagaattggcgatgaagcagaattcatttgctttttgatgaagttctgttgctttttcaatcatagactcttccgaaaccgtaacttcaggatgaagaattacttccgtaaaatgtccgcttccgtttgccagttctgtcattatacctgtaggaaaatcgctataatccgtcactacaactcccgcttccgaacaaaagtgaagataccaaagcatatggcatgaggaaattgaggagagaagcatttcttcgggattatattttgtcttgtcaccacgaaatgccgggtcggatgaagcctcgattagaactttattttccgcagaaatttcatgacttctttcgtattctctgtaagaactggttccttttcctttatttccggtccagcgaacggttattttgtattgatgatttttcattttgataatagtgcgtaaaactttgaaaaatgcaaaattttattaagttttttccttgtttcacttttagataaatttttaaaatttaaatcgtataaaattacatctctatccatgaatttgacgtaatatatagtattttctatagtatttataacgccttgcttggagtaaagcgttttaaaagattttttaaaaaattttctaagctcatcttttgtatattttttggaaagaatttcatacagttttgtaacagtaggagaattttcatgtaccattggaatagcagctaccggaatcaggatatcacaaattttttcatcatcgtgaagatttgaatagcattcagaatagagatatgcaatataagcgatttctgaaaatagcccatttccgcaagatattcttaccgggttattttgggctaaattaagatattgtatggcttccctgtaatttttttgaatcatctcaagatgagcgagctttttgtagagttcatacaaaaactgacgatcttcactataaggtattcttaaaaaaggatcttttaagtttttgttttgttcaaaataatttaaaagttccacataagatttttttgcctgatcgtaatttttcaatgtatattgagcagaagctttacctcccaaaatactaaatgtgtagtctgatacaggaaattttaatagaaacgtatcatattgctcaaataaatgtttaaatttttcattagctgaatcctgtttcccattctctatattttctataaagtcatcttcagtttgccttattatttcatatgcaacagaatcttccttctgcccaaaggcaaaaaatgaacacagtagtaagagtaaagagaaaatgcttctcattaggtattagtttttataataagtgtgtaaaattatgaaaatcagaccataaaaaatctccgtaaaaatacggagattttaaattttatgcgttaaaattaatttttgataagtttttttgttaaaatttttccattttcaaaagtggtttttgcaatataaatacccttttgaagctcggaaacattagaattgttttctctaacggtctttagaagctctccatcgatagaataaatgtctattttgcctattttttctttcgatttataaactaaattttgctttacaggattctcaaaagaaatatcattctcagcttttgtaatatttagagttgataatgtagtcgtattaaataaatattttacaatatttccgccgacatttgaaataatattattgttgttgactattatttcttcaacactagcaaaagagctgtccgcataataaccaaaatctgaagctattgagccgctttgagtgagttctgtgaaaaaaacaggagattcatctgatccgtaaggaatatatggatgagaagattggtttcctccaatgtaataatgtccatctttttcaataatgctttttgctaaagcagtgggatgtattgcagataaagcacaattaaatgtggtatcaagagttccatcagggttaagtctaaaaacttcattaccggcaggatttgattttgaaataacaatcttattattgctgtctataattgctgtactaaaaggagcaaaatctaaattagactgtaaaacaccattatttccaaagttcattagcggctgtccattcggattgaatttttcaatgatgccattactgtagggtgagttgattttagtaagacaaataatattagattgattatctagtagtacaaacgcgccatagtaaaagtttccctgaattgctacggaaccattaactccgaatgaagtatccatacttccgttagcattaagcctgtagatagcagtagaattataaatgagtatttttccattttgtaggagtagtcctaaggaacgaccatttgtatcactgttaaaatcattagatataacagaggctccattagttccgaaagtggtatctaattgtccgcctggaagtattctgtatacaattcctacattggcagaaccggaaattccaccactgacattaccgtaaccaaaaattacaagctttccatcaggttgcattttggattgacattgataggtgtaataagataactgaatttttccattgtttccaaaattcgaatccagaattccattatttgtaagcttatatacaaatgtttcattaccattcggcacagaataagatgaataaatactgccattggaatcttgagtcatagtccatgaatagctgtaattggcaacatcagatattccgtttgaaccaaaagaaagatctttggaaataatctgtgcaaaagtaagatgtactacagtaagcagcacaagaaataatagttttctcatttgtgtttaaaattcttttgtgtaatctgatacaaatatataaaaaaacctctggttttccagaggtttaaaattttgtatcaattagaatatcctatcaattcttctttattggaattgtaaattctgtattctaaatatttaaaagaatcccttggaataacggttacccactttttgtatttcataaaccatttcatctggatgctcttaattcctttcgtaaggtaagcttccacaaacggatgtacatgcaggtaaagttttcctttttccttctgcataatggttctgagggtttctcccattctttccacaataacgatcggagctacgatttctccgtctttattcgggttttcttctttggtgtcgatctgtttttccggacggtttctttgtctggtaatctgaatgagcccgaatttactaggcggaaggattttatggcgggctttatcacgcttcatctcttccttcagatgttcgtacagatctcttctgtgttcggggttcggcatgtcgataaaatcgatcacaataattccacccatatcacggagacgcagttgtcttgcgatctcggttgctgccattttattcacctttaaggcgtgttctttatttacggcagttccggttgtgatgttgtttccggagtttacgtcgactacgtgaagtgcttctgtgtgttctatcaccagataagcgccttttgagcttgggatattgacgtgttttccaaagctttgtttgagctgtttttcaacattgtaatattccagaagaggaatatgggaatcgtaaaaatggacaatatttttcctttccggagcgataacttccagatagtttttcatctcttccaccatctgttcgtcgtcgcaggtaatgctcacgaaatcctggttgaagttgtctcttaaaatagctgaagctttatcatcttcgcttaaaactcgtgacggaactttattcttctgtatatttttgaaggttgtttcccacttctgaatcagctgattcatatcattgtgcaggtctgcaacttttttgccttcggcaacggttcttatgataaccccgaatccttcaggcttgatgctttcgattaaggttctcagtctctctttttcttcagaactttttactttcttggaaatcgaaactttgttatcgaaaggaataagtaccaaaaaacgccctgttaaagaaacctgagtggaaattctcggtcctttggtggaaatgggttctttggtaatctgtagcagaacaagatcgtctttagcgattaccttgtctactgttccgtttttgtctatttcgggttgtatctcgaaattttttaagctcgaagtattctgtttcttggaaatcgtatctcgcaaaaactttctgtacgtaaggtactgtggtcccagatcctgataatgcaaaaaggcatccttttcgtatcctatgtttacgaaagctgcattaaggttaggtgccagtttttttactttcccaacaaacaaatctccaactataaaatcgcttttgtcctcttgctcatgaagttcacatagtcttccgtcttccagcagtgcaatctttgtaagatcatcctcatgcgaaactattagttctttcttcattttgttgtaagataaaattgttaagattgtaggaaaagagtgtttttttcatcaaataaattttaaccttaagttaagcataacaattgaatgaatgatattttttttgataaaatataaaacgttcttttccttagacatcttatagttgcaaaacaaaatatagtcggtgaggctttaaaatttaaaatcaccaactatatctttatattgtaaatcccgagaaaaagagattatttcttcttatgtctgttcgctcttcttcttttctttctcttatgagttgcaaccttgtgtctttttcttttctttccgcttggcataattataattttttagtaactagttaatattcagttaatttcttattttactgtaactttcgtttttactttctccacaaaagattttgatggcttgaaagcaggaatgttatgagcagggatttcaatggcagtatttttagagatgtttcttcctgtttttgctgctcttgttttaatgataaaagatccaaaacctcttagataaacgttatctccattatacatagaagtcctgatttcttgcataaatgcctctacaactttctgtgtttcattcttttcggttcccaacttatttgagatggtgtttaccaattctgcctttgtcatttccttattttaattttaaattttaggtgtgcaaatttagttaaaaaaattgaatattagcaaattagtggtaaaatattttttgataagaggttgagaacttagtatttattctgtaagcatattatattaagtcaccattacatactggaattgtagtacccattctccacacagaagcggatgaggtgaagttttgtctttaatccgagcttttctgtaagacggttgatgtacgtatcaattgttcttgtgctgagattcagtttttctcctatctccttgttactgaagccttcatagcagaatttcatcagttggatttctgtaggagaaagttcttcctggctttttttctggcggttcatataatccattaccgctaaaggctgctgttcccactgtttcgtataggcttcataatcgaaactgtctgaggtaatttttcctttgatgatttctttaataatcgtactttttttctggcagtaaaaaatgttgggaattttagaaagaatttccgccatatcttcctgatacgttccggagtaggtaataatcggggtttcagaatcgcttttccggatgtatttaatggcttccagcccgctgagaacaggcataaaaagctctacaataaatacatcttcctgccttctgtaattcctgctgatcagttcatgcccgttgttgcagtcgttcagcagcatgtagaacggattttccgtcagcgtcttgatcattatttttttaaaataaaaatcactgtcggcaatagaaaatcgcacagtattggttaatattttgctcacttttaatatcgatttggtggatgataattaaaattcagatcactaaattaggaaaatatgctgaaagtgaaaattaatcttaatttaattcgaaaaatagaattatttaatgtaaaaacttaaattttgtgcataaattatttttttataatttcacagaaccaaaccaagtcacaaaatatgtcttcgatcagggagaaaaaactaaacaaagcagacgttagggtaggcatttggaaatttgttctatcattcattgtcttatcaggtgtatccttcatctgtgtctttttcttttttaaaagctatgatatccagcgggaaggaatcaaaaaacaggcggatgactaccgcgaactgctcaccagaagcgaccttctcagaattcacgtcgacagcatcatgtatcgtatggatcagctcgacatcaacaaggtggataacgatattttcctccgcaactacatcatggataacgtaagagatgccaaaaacatcatgggaaaagacagtgccgacaattttaagcattattccatcctcatgaagcaggttgagccgatgcttgcactgaaaaaccagatcgtgaacgtttcctacaaagagcagaatgctttacgggatctcagcgaatgccgcggtaaagtaggaattgtaaaccacgaactcagggtagatcctacaagaaaattttcgggaagccgacgaagaagataaaaactaaaattatgcagggacaaatcacactatcgaaaaaagaaaggcattaccagtttttatatttaattgtaatgctttttgcagcacttatttttctgggaattatctttttaaaaggttttgaatctccgttttcagacgaagacatgatctcggtacagaatcttgaagaaaaggcaaaattcgatcagaagcagaaattttcctacaaaactttagacagtaccttttctatgattaataagctgacagacgaatcgccgcagcctttcgtggaaagcaatatcatgtacggaattaacgacgttgccaattacttccagaacggagataatatttcagacatcagaaaagatgcgtatccgcagattgcgaaattctacaaaatgtatttcaacgataaaaaattaatttccagcaaaacagaaaacattaaaagctttgaaaaacagtttgaagaatgctccataggtttcaaagaaaagaaaagccagctttttcagcgggaaacagctttaaaagctcggactcagtaaattttaaaatccttttcataagacacaccaaataaaacacacacatcacacaatcattaactatgaattattttcaaaaaaacaaaaaaaacattatcatcggtgttattgcgacgctgctcattgcagcactggttgcattgtggctgcagaagaaggtaatacactccgcagatgatattgtaggggttgtttatccctcttccctgaaagtaggagacacccttttgtttgaagacaaaacccagtttgcaaaaaccaaaaaatggatcttcggagacggaacttcaagcgataaaaacagcggctttcacttttacaacagaccgggatattatcaggtaacgttgattattgataataaatattccaaatcttttcctgtaatggtttccgcgagatcaattccgaagcccgtagattctgcaaaaacaagaactttaatcgacgcacagactcaggcaatgcagtttgaaaacgtacagttccgtgcgatttccgatgccaaacagtttacctggaagttcggagaaaccggaaatatcgattctaaagataaaatggcaatctattcctacaaaaagccgggagattatgtcgtaacgctttacacggacgaaagcgcagagccgattcttcatcagatcaagattcttcctgcttatgatgccttggaagaagaggtaagtgtagaagacgcttatgctaaaatagataatgattttaaatatcatcttcagcagatcgccaacggaaacagctttaatatgcattacaattatttactgagaacctatctgtgcaataatgaaaataccgtagtaaaagtaagtgacagcaaagtcaataacttttatatgtactgtgctggtcttcagtttgataaaaatatggtcattcagaccgtaaaggtaaacttcgatgatgcacagaactgtgtaaccaaagttgatattaaccaaagtaaataatttccgttcagaattttttttgaaccaccacaccaatcattaaataaatcaggatgaaaaatacacttcctctagcagcatattatatcggagtttcagtattgctcgtaagctgtcaggtaaaactgccgtcgaaaagaactccggaacccacccattacggacaggttgataattctccggtcgtcaacggttttcctaaaaaatcagttccgtggattgccatatccgacagatccagaaataccgcatatctcgataaaagcgatgaaaaatcctataaggaagttaaatttctggaacctttaatggtgttaaaaaaccgcgacggaatggtaaaagtagcagaatacattccggatgcgctcatgaagaaagtatcttccaaacagattaaaacctacggctggattcctgaatctgatcttcttttatggagcaattccttaaaaagcgaaaagacaggctttccggtaagagtggccattgtaccgagcaacagcgaggtcatcaaaaactcagaaagatattacaagaacgattccatcatggttttcaattcgccaagtcttattgaacaggcagatgtaaaaattcctaacggacagatcgtatacgtctacaaacaggcagaaaacaacaaacgatttctggtgggtaaaaaaccaaacatcgatatcgacagcatcagtacaagtctgtacggatgggtaagttccaatgtggtttctacatggggagaacgttctgccgtaaaaatgaaaaataccacaggaattacagaaaccacgctgggaattcatgaaggttctccgggaggaaacgaaaccgaaaacagaaccgctgttttgttgacagacgtaaacaaaagaacaccccttgaaaatatttttcctgtaacattgcccttaaatgaaccgcccgctccggattccaaaacaaagtattttaccaatattttagattacagcaaaaattacgttttcaatgtattgggagagccgatatattttgaccgttatcgcgagattacagagaaaaataaaaaaataaatatcgtatttgccttagacatcagtgctccgaatgcaccttatgctccgattgttaaatctttgttacaggatttgcagttgagattcgagaagccatcttactttaatcaggtaaaatacggagtggtcttgtacaaaaataattcttgtggagacaatgtggcggtttcaaatttaagcacagattacagcaaaataaccaccttcatcgatcagaagagcaatgagatgaactgtgtaagcaacagcggttatcagcccgtaaatgaaggtttgatggcagccggaaacctcttatccaacgttccggatgaaaccaatatcgtaatcacggtgggaacatcgtccagtcagggcggaaatatgtacggagtcatcaattctctaacgcaggctcaggcgagactcatcatgttccagaccagtgccagatcatccgatacctacaacgattttgttttgatggcagaaaatgtggtaaccaataccgcaaaaaatattgctgaactgaagaaacagaaaattattaaccagaatgatgttttaacgaaaaataatttcagtctcattgaaggagatgaaggctttttctcactcgattatccgaagcagagtatggcacagggatttgtaatttttcctaaaaaaggagatatcgcgaagccgggttatcttaaaaaatctgtcgacagcctgattgcgcaggttactctcgataatgcgactttggataaatctttaaacgattatttccattcatcagtaggagcaggaagaacggatgtagatgtaaagtacaaatatctttatccgggacttaccaatcctgttccggcaggaattgccgcacagctcatcaattacggaaatccgtttctggtgaaaggttatattccgaaagaactgaaagattacaaaccgggattagagaaaggaattttaatttccgaaaaagaatttgacaatttaaaacttttctacaccgaagtttatcagaatacaggagcggaaagatcagatttcagccagtccacagcgattaacgagtacgtgaaactgctgaaaaagtacaatccaactctgaaatttttagacaaaagtgatctttacaaacagccgatgtcttactccgtgggaatcagcacaggttttgataattctgatgaagagctgatgtcgaaatatatgctgaaaggctggaaaaaatctaaaattgtgactaatgaaacggtaaaaacctattttaaacattacaaagatttagccgacagaatgttgtctcacagaaatgatcctgcggtgaaaatcgagcagaacggacagactttctactggctgaacgaatatttcatgcccaccatgatgcctgtcgaggaaccggaatatactcaacattaattctttataaatagaaaagcggaaaataattttctgctttttttattttttaatgtaaattttttatctttggattacccaaatcacgtaaatatgtcacagcaatcatcacctcatgacggcaaatactttgttgtccggaaaggcaaagcccagtgtaatcagggtgatcagttcccgcagtacaaagttacctcccatcagaaacatttttggaacgattccgatggtaatgcagattttcttggcgttaccgaagacgatcttcagtttaatccatccggtcccagtttcggaaaatgtaaactgaaacctacttcaggaggttatctgccatgttcttatgcacctgccggaaaatggcagaaaacatacgacaaagtaaccattatgggtaaaaagatcgtcactgaactttctgaactgcaatgtgtaatcggaggtaaaattaccatcaaagatcacggacagcgtggagaaatgagtaaacagaatgtgaaaaatgcggataataaaaccgttcagcacatcaatcctttagtgaaaatgcaggattttaaagaaaccgttcttgaaaatgaaattgatgcgtattaattaatcaaaaaaaacgttctatgtctaaacaaggagtttcaaagatctcaggaaatccaaatcctgtagttggcgaaaaaacaacttacatggttacggactggtatcctgctacaccttcaggagaaagaaatcctgctttggtaacctgggagctttttaaaaaacgtcccgacggaagctttaccacaacaaacatcaaaaaagtgggggacggaagttttacctttggagaagttgcagccaaaaatacctatcgtctcgaagcttatcttcatcagcccgaaggaaaaggaagtaccaccattgatattactccgcaaccgggagaaattccaaagatcaataaagtggaactgcgctatgcagacgattctccgggaaccgttttcagttatcaggaaaaacttattgccaacgcgcagtgcgtaaatcttgcaggtgaaaaattattgtttacgctttgggaagatgatgcagcaggagggggacataactctaaaaataaatttgtagacagcaaagaagcggttgtaagcagaaccggaacggcaaccgcagaatttatgctcacgaaagctttgatgcagaaagcttcgcagggtgaaagagatcctaaagaactggaattttatgtaacggtagaatattacaaagacagaaaacacgcaagtgaaaacagagtgataaaaaatcctgaatacaaaccgcatgttcagccgtctcaggctccgaaatccacgccaaaagccaccgggtcacctgccgcttcaaaatctgattctaaaaaagaaaccagcggagtatttgattctttcacagaaaccgtaagaaatacatggaatgaactttgggactgggcagaatccaaaggaacggtaaaacctgataaaaaacccacgactcccaaaccggaaggtaaaacaacgagtgtggtagatcatacggaaaaacaggcttcagataaaaaaggaaagtgcttttgcaacagggattttaccgctgaagaatttgaaaaaattattaaaggacttagagatagtgagccaagagttaaaaaagacagcggctatgcactttttggtgccagtaattgtgaattgccggaagaagataagacgattgaaaaattaagaactcagttgaatagcctttttacaaaatatcagattaatacatgtttaagaaagcttcattttctggcgcaggtttatcatgagacagaccggttaagaacaactttagagtatgctactaaaaaagattataaaccttattttggaagaggcttaatgcaattaacctgggagagtaattataaaatctacaaagcatatagcggaattgattgtgtaaaggactatgacaagattgcaaacaatctgtccaatgcctgtgattctgccggttggtactggaagcagggaaaagttttaggagtaggaaaaagatggaaaggacctgccgatcctcctgcatacgtaaagattcagaatccggattatcctaaagaaacaattacttacacagacggaaaaacaagcggaaaatatggtaccgtaaatttaggattaattgcagatgacgataaagtagatttaataagttatttagtaaatggaggttctaacggactgcaggaaagaagaaattatgtattaactttaaagaatatttttaagtatcctcaggattgtgtaaataaagaccagaaaaaaacggctgcatcttcaggaagtacttctgtaacgattagattaaccagaaaatggcagacggacaaatctacaatcggagaatttacaattgataattcggaaattaaaggttatattcttgaagaaaaaggtcccgatactaccgtttcgggaatcgaacaaagagttcccgtcggtacatacaatttggagtggcatgccggaacgaaaataaaaaaaggattaaaattatataacgatgtagtatcaaaatcaagagccattttaatacattccggaaatacagcggatgacaccgaagggtgcttattaccgggttctaccaaatccaaagactttgtgggaggtagtaaagtaaaattaaaggaaatatttgactatgtagaagaaattggcataaaagatgctaaaattattatttcacaagcgtatgaatagattgtatttattgatgtcatttgccgtattattttcgtgcaaaagtccgtctcaggaaaatgctaataaagatattagtgaaaaagttaccacccttacaacgtcactcgaaaataaagaagaatcagcttttctgaacagttttcctaaagattttacaagttttaaaaatacttttggatgggatgatgaaaaagatactgcaaaaccactttataataatgccaataaatatattgactatttgttctcgcttattaaacagccaaaatacaataaatacgaaagccagatcattgatatatcaaaaggaggtatttggcaggctgatgcagttgcgtattttcagaatagtgccgtaaagtatattaaagaaaataaaagatatcatcttatcaattctctttcagataatgatgcaaagtctgttttgtcatttttatttgatagcggatcaggatttaaaaaagattcggattttatttcaaatttaaataaagaaaaacagcagcttgccaatagttttttatctgccaatatctcctctgaaaaaaagcggggatcgtttgaaacctatgaaaataacaaaaattatttcataaaaactttcgacgtaaacaaagatggaattccggataaattagtaagcagtacagcttatcagggcgaagatttatttgtttttttaggaaataaggcaggaagctatgatctgaatttggagacaacgaatttttctgaagacggaggaaatatcatcagagatattacaccgatcgccaacagtaaaggttttacagtgaaaacttactttcccgatcgtggcttttatgaaaaggaatttaatattattcccgaaaataatacatggattttgagaaatacgatttataaaaccatgtctgatgtttcagaaaatgctttaaagtacatttgtgatgtttctcagaatattgatattacaaaatccggctggtcagacagattaaattctattccggaagaaaatgaaagaagcaaaaaatgcagggtagaaaaagtttcggaaaatgggaagcagtaccttattcaggatccggatggttatacgaatctacggaaagaaaaaaatacatcttcacaggttttacaaaaaataaattcaggtgaaaatgttgaggttctggataattccggagactggtatcttgtaaaaaccagacagggcactaaaggatatgtgcataaaagcaggataacatctgctcattaataataaaattaattaaaataaaggaagttatgtaccatgacttcctttttgttttaaaagatcggatttttgaaataaattaaaataaaaatattttcggattaaaatttatggtatttttgatctaataaatacgtcaaaagtataccttatgattacaaaaaaaatcattggaatttgtttactggcagggatctttaccatttcctgctccaaaaatgaaacaaagaacaacacaataaaagcggactcaatgtccgtttctcagcctgttgaaaaaacagcagttcctgttgataaaaaagattcagcacaatctgaagaacaaacagaaagtcccgaagaaaaagatacaaaaaagaccgtttccaaaacttctgttgaaggaaaatttatcgcaacaacctgtgaaggcggaagattttcaatagaatttaagaataccgacggcaatccaacatttaaaattttagataaaacaaaagtaattgctgccggaaatgtttctgcggaaagcgatgaaaaaacaggagagatcaccaatattatgatgggcgaaattggcggtgtgtatgaaggtgacaaaattgtgatccagaattacggaaatgccatgaacgaattcgaacacttcacccaatgcggcgacaaatatctggaattcaccagacagaaataatcaaaaattaataattgaaatagaaacagcatccattttcgggcgctgtttttttgtggttaaatttaaaatggttttaaaaaaggctgcatttttggctgagtagaacacctttgtgaacttaaaaaaaaatgattagcattaaaaaaacttgtgaacttacgttaaattaacaggataatcaaaacggcaaaactattttgctgactaaaaaatttcttctaacttagttttagccaaaaaacaaaatatatgaccgttcattttatcctttccggtgaaacgctggaaagtatagctgaagaaattaatctcgaaaatccaaaataccttaaagaatttcacaatacccattgtgcaagagaagattttatagatgatgaccttgttccgcggaaaaaacttcttattcctgatattcataaaataaaggaatacaacagccgcaacgatgctcattttaaaagtccgaaattaaatcctcacattcctttccgtcccgaaaatctggctaaaatttatactgttgaaagccgggaaaccgaagaaaatgtgcttgaagaaaaaaagaatgcactttcttacaccgtttcagtaaagtggattcggaaagaagacaatgttcacttttttcacctcttcaaaaataatttttcggaaaaatcgggaagcatgatggcagatctcgcttcagaatccatccgttcgctgaatcctgttgaggtaaaaaccgactataaaggcagagttgtatttatttccctaaccaaagaaacaactgatcattttagtaaaataaaagaacgtttagaagatctttttcccgataaatacgccaaaatatatcttgatgaattcgaacggattgttctcaatccttcacttttccacagcagaatgaaggacgatattttcatcaaaaattattttgccgacctaagaaacagctttagaaacggaaaatcttacttggctcagtcaattggagaagagcatacagaagttcagcttttgcaacaggtggaaaatgcggattatgaccgggaaattactcttcagcaaagaataaatccattggaaaatgataaagatttcaaaggaaaatatgtgctgtttactgaatcgggattagtgaaagagatcgaaatcaaatatactatttctcagtttggtgtaaaaaatacgagtctttttgtgttaaaagaattgtcgtaaacattttacagtaaaggattgttaagattttattaaatctacgatcgtagaattacgacatcaaatcgtagaaatacgacaaaatttaaaattgctgtttaaaaactttcagaaaaaaaattgccgtgctacctttgttacacaatcaccgaatcacaaaatattattaacgattaaaatttacctatcatggcagcaaattcaagaggaatcttaaaattcaatggcggagaagggcaaaaattgctgaaactgaactacagcgtttcaagatctacggatgtttccggtagagtagcttcagatccttccaatgcgctcatcaaagtaaccgtagaagcaacagaaaaatcagacattctggaaagcttactgaacggaaaatacaaaccgacaaccggagaaatcacctttaataaatctcatgaagaaggcacattaatcaccctttcatggaacaacggatacgttattcagcacgaagttgagttcgatgcggtagacgaaaacagtatgctcatcagtttcgtggtaagtgcagaaaccatcgactacggaaactccaaatacgaaggtctttggccatcaagctaaaatattcatttcatcgtattcatacaaaagactgtcgtgcaaggcggtctttttttaccatttttaattaaattttgttaaaataattattctaaatcacattattaagacatatttttccgtttttgagaaaaaacagttaacttagtaaacaataaaaattcagaaggttatagattcatcccataaaaaaataaggaaaatccaaacccgaagaacaccaatcaccacacaccaaatattaatctgaatagtacaatgggagtattagttaccaatgagactgtaaagcagctatttcatatagcacaatccatcgcgaaggaaaattacaatgcaacctacggagcaccgcacattttgcaggcactcatgcacaaagacatcgggctgaacgaattccttaaaagcatcgacaaagatcccggatatttctacgaatgggcagatgttcgcattgaagattatcctaaaaccacccatcttcccaacgaagccggagaagatgaaacagtagatcgtattgtggaagaagcagatgatatccgtctgaaattaggtctggacgaaattaccccgatctgtattttaacagccattgtaaaacctcaggttgcttttaccttgcagcagctcaaatcccttcctctcagagaacacgaaatttttaatttatacagaaaagatacgccttacgaaagttcggaaaacggagaattttcttccatattttcaaacggttcagactattcagaccagtcttttccttccataaaaagctattgcacagacagaacagctcaggcgagaaaaggagaactggaaaacatcatcggaagagacaaagaactcagaatgctggtcgaaattctctgccggagaagcaaacccaacgtcattattatcggagaacccggagttgggaaaaccgctttggtagaaggttttgccattgaaatcaccaaaggaaacgttcctgagatgcttaaaaacggaaccttactggaattggacaccggcgctttattatcaggaacctcttacaaaggcgagattgaagaccgtctgaaaaaagtcatcaacgaatgtaaaaagatagaaaaagcgattctttttattgatgaaattcatacccttttagatcccaaaggaagcatcggaaacgttgccaatctgttgaagcctgaacttgcgagaggagaaattaccgtcatcggagccactactcaggaagaatacaggaaaattattgagccggaacaggctttcaaccgacgatttgaagtattaaccgtcaatgaaccggacgaaaaaacctgcgttaaaatgattgacgttttactcgaaggctacaaaaaacaccacggaattgaagttgaaaaaaccgcccttccggaatgtgtccgtcttgcaaaaagatatgcaaaaggcaaaaaacttcccgatgcagccatcgatcttttagacagaaccatggcggcgattaaaatgctcgacgaactttcagaaaaagaactggaaagctggaaattaacctacgaaaagcttcagaacgaagattatttcgatgaaaaagacaaagcagatgaactgatctggaattacaatctgctgagagacaaaataagtccgattttatggggttctttaagcgaacagccacaaatcgacaattccatgccggtggaacagattcagaaaattattgaagacagctatgccgaacttttgcagcacgcctcaaagaaaagagaaaaagtagaccgtctggaactggcggcggtaatggcggcaaaaacaaatattccgatcgggaaaattcaggcgcaggaaaaagaaaagcttctgaatatggaatctcttttaatgaaccgtgttgtagggcaggatcatgctttaaaaatactttccgacgcaattgttgaaaacaggagcggactcaataaaccgggacagccgattggatcattcttccttttgggacctaccggaacaggaaagaccgaattggcaaaatcgatggcagaactccttttcaacgacgaaaaggcaatggttcgttttgatatgtctgaatttaaagaagaacattcagccgcacttttatacggtgcgcctcccggatacgtaggttacgaagagggaggaatgctcgtaaacaaaataagacagcagccttacactgtggtgttatttgatgaaattgaaaaagcccatcattcagtttttgatgtctttttacagatcatggacgaaggaaaagttcatgataagcttggaaaagaaggcgatttcagcaatgccctgatcttatttacctcaaatatcggaagcgaagaaatcgtaaaacagtttgaagaagaaaaaatcccggaatcgaatactttgatgcagattatgtcgaattcaggacgtttcagacccgaatttttagcaagaattacagaaattattccttttgcgccaattacagaatccatcgctgagagaatttttaatattcagttaaaatcacttcacaattctttagcgcgactgggaatgagcctgaaaatctccgaagaagcagtgaaaaatcttgctttgggcggattcagcagcaaatacggagcaagacaaatctcaggagtgatacgttctcaattggcaagaccgatctcaaaaatgatcgtaagagaagaagtaaaatccggacagaccattcatgtcgactggaattccgaagaagaaaaactgagctggaaagtagagtaagaaaatagtgaatctgtttaaaaaacttttcacaaaagcataaaacaatgaacccaaatctcaaaaatatttttctaaccgcaatggtattgttgtgttctcattttacgaacgcacagtttcttgctgcttccgatacttcggaaagcagtgtgaagaaatacaaaagcatcattaatgccaacagggaaattgtagattttatcgaatattctctggttcagaaaggtttaccgagacatttgagaaatttagccttaatagaatcccatttcaacagaaatatagcttccggagccggagcagtgggagtctggcagtttatgaccgctcacgccaatcaatacggattaaccgaacagaacagaacggatctttacaaaagcacaaaaacagcaacagtttccttagccaatctctacaaaaaatacaacaactggatcactgtagtggctgcttacaactgcggagaaggaaatattgccaaagccatgacggctgcaaactctactcaataccatgttttttataagtttttgccggaagaaaccatcaatcatgttaaaaaatacctgaacgcgtgctacgcaaccggagaactgcagaatgttctggcaaactataattcctcaagaatgaacaccgttttcctcgtaaaaggaggaagcggaaaaaacaatgtgcaattggcagaaaccgagatcaatgcaggattcaatctcaacatcattgccgatgaactggatgtggaagtagataaattactttcatggaatcccaatatcaacgatgaacttcagaaaaaaggtgaaggcattttatatcttcctactgatctgatgcccgattttttattgagaaaaactaaaattctttcaagatccgtaaaagaaggaaatacaaaaaacaccgcacagtagaacactaagcgatcatgtttaacctaccaaatcacaggaaatatgaaaacagaatcacaaaatatactacagaatccttccttccgcccatcgcagaatgcagacggaatttcccagaatcatcatacaggaatcaaccgtctggtaaaactttctctcgtgatcgaaggaaaagtgattaaatattacaagcattttcaacttacccaaagtacaaaacgccaccaccaattcagcgtgacattggctcatgacgctttaggtgaccgacagactcataccctcgaagaagccaataaatttctcggaaaacgtttaacagccgttatttcctacaaagatattgaaagcagccccgaaagaacctttgtcggagtcattacaggagtaggtttcagtcaggaaaaaatgagccttggaaatattgtgttaacagggtacagcccgaccattttactcgatggagcgccgcatattcagagttttggaggaagttcaccggttaatatgggaatcattgccaacgaagtcatcaaacaggggatcgattccagccgttttgatgtgagagtggataccaacgattattcgcagattatttacagcagtcagtatgacgaaacgcactacaattatctggcgagaatggccgaagcctatggtgaacagttttactatgacggcgaagttttgcatttcggaaaacttccgcctcagaacaaaccgatcaaattaacctacgggagcagcgccaatgatattaaggttgaattaaaagcagtgcacacaaaacctcagttctacggctacaacagcagtaaacatgaaaaactgacttcgggtgaaacgccggttcagcatgtgggagatttggcaaaaacagcttattcccacaacgaaaaaatatataaaacccctgcattacaggttgcccccatcaaagcttccactcatcttgacgtggaatattctcagaaaagtgcggcgggaagtgaagcggtgagcgtattttcattttcaggaaatacaaccgttccttttttgcatccggggtgtgtggtggatgttcagatgagaaaattagacagcaatgaatccgattattttacgagaatcatggtgacggaagttactcatgaaattgataccatcggtcattacaaaggaagcttcgaaggaatagcttcagacaccggatttttaccaaaacccgaatttaaaattccaaaagcagaaccgcagatcgccaccgtaatttccaatacagatccggaaggacagggaagagttcaggtaagattcgactggcaaaccaacgatacaacgcattttatcagaatgatgagtcctgatgcgggaggaaccgatcaggtgaaccaaaacagaggctacgtcgcgattcccgaagtgggggatcaggtgatggtgaatttcgttcacagtcatcccgaccggcctttcgtgatgggcggaatgtttcatggcggaatcggtctcggcggcggtgtggataacagagtaaaatctatccagacgagaagcggtcacagaattatttttaccgaggatgaaagcatcgtgattactgacaaatcaggaaataaaattcatttagacaccaccggaagcaacatcaccattacagctcctgaaaccatgacgttcaactgccggaacatgaacatcaacgtcggcgaaaatatgagcaccaatgtcggaatgaataaatccgacaccatcatggcaaatcataccgaaagtgtaggttctatgaaatatctttctacaggagccgatttcatgacgaatgttgtcggaaaaatgagtcattatgtaaaaggcgatatggaagtctatggcgaaaaagagcataaattaaccagccttaaaggcgttgaggtcaacagtcaggggaaagtggaacatcatgcagaaaaagaagttcagaacaatagtggcgagaaatctaaaaatcactaaaaaatgagcattgaatattttgtagaagggaaagcggtcacacgttttgatggagattccagaacttttgccaaagaaggcatcagtcataacagtacggaaaccgtagagcagaagggaaacggaacgggagtaagctataacaaagcagaaaccattaatcccgatgataaacccgttaataccattgatataagcctgaatcttttttttgacggaacccagaataacaaaaccaatacccagcttggcggagatttcaaagaagcaagcagcgataaagacgacagctacaacaatgagtttacgaacgttgcgcgcggttacgactctatcgatccgaatgcacagaatcaggtttcatggtatattgagggaatcggaacagaggacagaaaaagcgacagcattttaaaaggcgttgcacagggaaccggagataccggagtggtggcaaaagtggcaaaaggttgtaaaaaaggagccgaagccatcgtaaataaacttaaaaataacacgaaaccgatcggggttcttaccgtaaatgtctttggtttcagcagaggagctgcggcggcgagacattttatacacgttgcaaactctccgggaataatttcttatgctttgggaaaggaaacgttacaggtttttcctcccgaattcatcaataatgaaacgattacaataaaggataaagatggctccaagtcgcagttcatcatgcggcacggatattttggagcctgtcttctggcgcaggatctggatgtgaaggaaataaaattccgttttgcaggactgtacgataccgttgcttcttacggacttaaccacagaggaggtttcgggattgatgatgatactaaacagcttggtttagacactattggaggcggaaaagtaaattttgttcttcagcttgcttcggatgatgaatacagagataattttgatctaacgaatatcgacagtacaggtttatacggactggaatttacccttcccggagtgcattctgatattggcggatcttacggagaaggagatgaaatttctgttttatattgcgattcttatgatccttacaataatatatttacccacaaagaatgcgaagcatttaaaaaaattgtagtagaggaagggtggtatcatgatgagcagttggaaattaaatctttcaggcagaaagatgtgaactatgaccgatggtggaataaaatctccatgtactacggtttggtgggaacacggaagctatccaataaatacgatcagattccgctgaaccagatgtttcattattctaaacagcataaagtaatatatcttgaagatctcatcaatgaaaatcataaaataacagattcttttctaaccggaatttacagccagctttcatcctatatgaacgcgtgtaacgagctcagaaataaatatgtggaagattttaacgcagggaaaaaaccttcagctgccaaatataagcaggatgtcaaagcaatttcgtatctgggacacatcaaagaagaagatcttaaagtattaagaaacaaataccttcactggtcggtaaaagccaaccagattggcttagatgcgagacctaatgataatgctccgaaaagaagaggcgcattggtcgcacaataccgcaaaagaaacatacagaatggataaaacgataaaaataatattttttttaaccctcctttttcagaatataagttgccagaaaatgaaagacgaacaattgccggaatttaacgtagaaataagcagtccgaataacaatatgattgtaacgcctgtagaagataaaatcatcactctggaaggtgttcccgcgagtctgccttatggaagttcgtcgggaacgtggggaaattcagggaaaggctggacagaacagcaaggaactcctatcggaatagatgtcacttatttttcaagatatgaagatactttttatcatctgaaggcggattttccggtagaaaaaattaaagattatatgcagcgtgcgtatgcgcagcgcgaagcttctctttacgataaacctttggaggaatataaaaatctgggaaggaatgaaaaatacagcagcgcagaaaatccgtacaacagttttacaacgttggtttttggttttgccccgaaaggaatggttgtagtatggctgagattccgggctgttcagattgagctgggaaaatttcaggctgaaatcgtaaaagatgatcagcagcttgagcagaagtttttttcgaaactttccgtaacgcgtgaggaaatgaaaaagaacagatttttggatgcggaacctaaagaatgggaagactacagaaaaaaatacaattggaaaccgcagattacttcagaaaatccggcttttaaactgtttgaatccaatatcagttattacaacgccgaagaagaagttattctccgttcgtggatcgataaaattccttcaagagaaagagcggttccaaaagaactgaattttatctgggaaaccgcaaaaggcgaacagtttatcggaagagcgtatttcaattgggaaaggctcaacagtgagttcgaaaaagcaggaaaagactttcagttagattttaaagtagcaaaagacaacagcagttttgatattttcattaacaatcagcccattaaagcagacagcataagaatattcagggcagaaagagaatttcacgactcctatcaataaaaataattcaattctcagtttagtttatagaattccggtgaaaatttttttcatcggaattcttgttttaatttcaatttcaaaccgttaagaaatagtaaaaatatcttaattaaatcttaatatttctctttttagtgtgtaaatttgtttgatttttattgtgttttaagtatttaaataattgattaatagtattttaatttaaaatataattctttaatcgtagaattactacacgaagtcgtagaactactacaaaaactgagattactgcttaattcctttcggattgaaaaaaggtgttatatctttggaataccaaatcacaaaatattaacgattaaaatttacgaatcatggcagcaaattcaagaggaatcttaaaattcaacggcggcgaaggacaaaaattattaaagctgaactacagcgtttcgagatctacggacgtttcaggcagagtagcatcagatccttccaatgcactgattaaggttacagtggaagctactgaaaaatccgacatcctagaaagcttacttaacgggaaatacaaaccgacaaccggcgaaattacattcaataaatcccacgaagaaggaaccttaattactctgggttgggaaaacggatatgtaatccagcatgaggtggatttcgatgcagtggatgaaaacagtatgctcatcagctttgtcatcagcgcagaaaccatcgactatggaaattctaagtatgaaggtttatggccaggagctaagtaattcaaaacacaacaatcatcttagtaaaaataaaattggttacagaatagcatggctcaaaagagtagctattctgttttttcttttttacactgaattatttcatctttttcaatgaattctttaaaaatagaagttacattgaaattcgatgataaaaaatttatttgatgtaaagtcggataaattttagcatttaaaacaaaacacatcaaatcacaaaatatcaggctatgtttaaggatgaaaatatacccaaaacgccttcttcaacaggagaatctttaatgctgatgaatgagaatttacagccgaataaacctgttatagtggatgaaaagttctggtctcagcagccgacttcgaaaatacataatgcaaaggcaattccagaaagtcagattcagggaattaaccgtgtggtaaagctggatattgttgttgagggaaaagcggtaaagcattttaaacactttcagttaaaacaaagtgcgacaagacatcatgaattcagtcttttattagctcacgatactttaggacgcgcagaaaaccataatctggaagcggctcagaattttttaggcaaaagaattacagtagtttttaaatataaagacctcgaagacggtccggaaagaagttttgtaggagttattacggaagttggattcagtcaggaaaaaggaagtctcggaaatatagttcttacagggtgcagtcctacgattctactggatgcggctcctcatattcagagttttggcggcgcacaagaaatcagcctgaacagcattgccaatgaggtgattaaagaaggttttggacagggaaaattcgattttcgcgtagatgcacaacacggaaatgtttcctacagctctcagtatgaagaaacccactacaattatctggcaagaattgcggaagcctatggcgaacagtttttttatgacggtgaagtgctgcatttcggaaagcttcctccacaggaaaaacctgtaaagcttacctacggaagcagcgtgaatgatgtgaagatcaaaatgaaagcacagcacgtaaatcctacattctacggctacaatagcagtaaaaacgaaaaattaacaacggggaactccaaaatcagtcacacctcagatattgccaaaagagcgtatgaaatttcagaaagaacttttacgacgccatctttaagagttgctcccattaaagcagcctcttttatggatattgatgcctcacagaaaggaaccgccggaagtaaagcttccgatgtttttataacttcgggtgaaactaccattccctttctttatccgggttgtatcgctgatattgagatgagaaaaaccgatacgaacgcaaccgcttattttaccaaattaatgattattgaagttaatcatgaagtagacgcaagaggatattataccggaacttttgaagcgattgcttcagacacaggatttattccgcgtcctgaatttcagttgccgaaggcggaacctcagtttgccaaagtgatttccaactcagatccgatgaatcagggaagagtaagggtacagttcgattggcagaacggttcaaccactacagaatacattcgtgtaatgactcccgatgcaggaagcagcgataaagtaaacaaaaaccgtggttttatggcagttccggaagtaggagatcaggtaattgtaaattttgtacatcaacatccggatcgtcccttcgtaatgggaggaatgtttcacggtgcaattggtgcaggtggtggagccggaaataatattaaaagcttaagcagccgaagcggtaacaaacttgaactggacgacggagcgggttctgtttttcttaccgatcagggtggcgcgaatatgaaatttgacggagcagggaatgtagtacacaatgcaaataatgacagcaccaaaacggttgggaataataaaacggataaaatcggaaacaataaaaagctggaagtcggctgcgatcatattgcagatgtgggaaatactcataaagtagaagtaggaaaagggaagagtgtctttacaatggataatacaggaactattgatttaacaggagttaaacaggttaaattaaaggttggcaacagcgaaattatcattacttccgataagatttctattacaggtgctgaagtggatatcaaagcgggggaagctacggcaaattttaaaggaaataccaaaataaccggaggacaggttgatattaattaacagatggagtttataaagtacgaaattaaaaagggtgatacactggaatctattgcagcggaacggggcatttcagtaaaagagcttgtcgattttcataatttatattgtggaacgacaaattttattattggaaacacgctgcctattcatcttcagactctatgggtggaaaaaaagacgaagaaggaaatcaacagggcaatagaagacgtaaaatttccgcgaaaagcaagatacagatgcgaacagttcaacaccaccaaattagaggacagaataacgtttcactgcaatacaaaaaaagaatatgtggttgaaaaagatgctgccagtacaaaagcgaaagtcaggcttaaggaatatttatacaaaataaatcctgaaaatatggctcttgccatagaagcggtaaaagaactggaatttgataaagaaaatgttattttcgaactggaatctgacaataccataaaacgcgtacagaatttccctgaaattaaagaaaagtgggaactttttaaacccagattaaaatcttcagaattttacaggcaggtagaaaaaataagcccgaaagcggctgaagatattataaaaggaggtggactggaatttgaaaacgaagcaaacctgagaaaaacatatgataaatcacttctctatcacgttcttttcaatgattatgatgcccgtaaaaaaagcatacagaatagcacgctgaaatttatttcccagatatttgtagatattcatattgagctggaattgcagcatagcatcatcaaggaagacgattattttatagaattcagaacggtaggaacacttttaagagataaaatagaccattctgtactggaacagcagtataataagttctataaacctattatcgaatatggtttcagcgaatataactatgattatcggatcagaaggatggttgacaaaaaaacaggaaccatcgtcaatgcttctgccttaatgaaagaagaagtgaaaaataattatcagttggtcacccagtttgatttaaagcaaattgaatattaaaagtatcttagttatggcggataaagtatttacattcaataacgttttaccctttcatattgtaaaaactcttttggtgattataccttgtttaatggcttatggtgcactctattattggttgtttaaaggagtattcagactctcatttgccatgttctttattcttttttatctcgggacctgttatcttatactcaaagcaatgtccgtaaaagtgaaaatatggtttgatgaaaactctttttacctgcaaaaaggaaatcagtctcctgaaaagtattccaaaacagaaatagaaggattctacgcttatgattatgaaaccaaagttccggcattgcagagttcaaaaatatacttcagattctgtctgaaaaataagacagatatttatttaaatgatgttgaatacagaaataaatatgaagaggaaaaagggaatgaacttaagaaattactgaaagcggctcagaaagaacttaatttttcaaaagaagaaaagaaaagccttcagaatatctattggtattcacagtataagtaaaatatgcccatacttattcgcaaattgatgatgtttaaatcaaataaaatacaacattatgagtgcttcatatatcccgaaagatgtttatgcagtctgtacatttcaaacggattcggaacccagacaattaattcccacaagagaaacgatcacggttttctatggatcagataaaacaagacctttattaacggttgaagaccggaatatcaataaagaatttccctgtaaaagtcctaaaaatgcaatgtggggatttctttgtttcggagccgggcttattgtaggagcgcttctggtgttatccggtcctgtaggttgggcggcactggctgtaggagtgggtgttcttgcgtgtgtaggagctgcggtttatcatgccacaaaaataaaccatttatgcaccgaatctttgggaaaaggaaactggaagattgaacatgaaaaagtaacctttgatagatctaaggcgatcacccagaattccatactcgtttgcgatacaggaggtttgctgagtccgatttttagttatgccgttgctaaaaaatacgcacagcagatcgatagcaataacggaaaagaaatttttcttaatgcggctgcatcttttttcggaggagctgggattgtaattgccggagctgaaatgggaattgctaaaacattattatggatgggcataacgatgggtgtaatgaatgaattaagctactgggaaagagaaggtatccgaaacagctccctggaagataacagccattatcaggatatgaataaagaagcggatgaaaacagcagaattccgggctatttaaatgatgtaccggaaagcgttacaggcattactccttcagatctggcaagtcccgatattcttgagcttaatgaaaaagggggattagcaagcagagacggaaaaacgccggttttctttaacagcaaatggtatgttcaggactggcagaagaatctgatagagataaaacagggaacagccttatccaaagacttaaccgctttagaaggaatagattcccgcgaagtatggaaaacccccgaaggaaaagcaattgtagagaatattcgtaacggcaaatactcagaatcgcttgtcgcaacagctaaagacggcttaggaagagtacgtccccgaaacctgcccaacttagccagagaacttcccgctataaaaatgcagaacatcaaaaatataggaaaactcggcgtaaaaggaggaggatttgtaggattctttttcccgtttattgcgacctatttttcagaagattcaagaaaaatactggctcaggcaatggcggaagactttggaaaaggcatcaatgtagtggcggataaagcctgaaataaaagacttatctgagtttcgtataaattctcgtaacaataattcatgataaagataatctcgaaaacgttaataaatgttataaaaaataaatgagctcagaaatttattatctttaatattcaattaattttaataaaaatagtatggaagcctacaattttgagactgctattaaaccctttttttgggtatcctcagaaaaaacatattcagtatgtttaaacgcaggaacgtacaaacctgaaattttcgaatggagaaaagacgaaggtttcgaaggcaacggttacgactggacttcactggcaaaagtttttgtggaagagaaaaaacggaacctgtcggacgacattaaattcgatccggaagccgatatgttctgtgcctattccagcaatccgggaagcctgaaagaatttatttctgaattcaaaaaagcctgcgaagacgaaatgctgattcaggatctcttttcaaaagccgaaattgattaaatatcccttaaaatattcaaaaagatctcaatttgaggtcttttttatttttaacattccaactgtttaaacaatttcgatccaaaatctgttctttcttatcctgtgaatgaaaatattttcaggagctgtttctcgctttccgcactcgctatttctttagtttcggctgcggcggcaaagccgtagtcatggtcggaagatttttttattattttgaacaatgttttttttaatttaactatatgattttcaattaattgaattgttgttttggtttttatttcatatatttataactgataattaactatttatgtccgtttttaaagaccacaaaatttcactnnnnnnnnnnnnnnnnnnnnnnnnnnnnnnnnnnnnnnnnnnnnnnnnnnnnnnnnnnnnnnnnnnnnnnnnnnnnnnnnnnnnnnnnnnnnnnnnnnnncgagctacctactgctccatcccgcggtatatttttaaaaacgttaccgacaaacgtttaattagtagcgggaaccggactcgaaccgatgaccttcgggttatgagcccgacgagctacctactgctccatcccgcgatattggactgcaaatatacgaattatttttaaaactcctaatttttcttttaaataaaggactttcatgaaaactattttaatattcgtatctttgaactatggcaaaaatactgaaaatttatccggataaccctcaggaaaaccttattaatgaggttattaaaactttaaacaatggtggattaattatttatccttccgatacggtctatgcgttgggctgtaatattttcgacataaaagccatggaaaagcttgcccagatcaaaaaaataaagctcgaaaagtcgaaattctccattatctgtaatgatttaagccatctttcagattttacaagaccgattgacacgtcgactttcagatttctgaaaagccatcttccgggaccttttaccttcattttggatgccaataaaagtctgccgctggcttacaaaggacacaaaacaatcggaatccgtgttcccgatcatccgattccacaattaattgttgaaaaattaggacatcccatagcttccacttccattaaagatgatgatgaaatcatcgaatattctaccgatcctgaactgatcgccgaaaaatacgatcatttggttgatatcgtgatagattccggttatggagataatatggcatccacgattgtagaccttacttccggagaacctgaaattatccgtcagggaaaaggaaatatttaattataaaaaagctttgtttttttatttaaaatgatggttgaaggtttttagtatgagtctgaacggaaaatattccttaggaattcttcttacatttgttttgctcgccgcagtaatgctgtatatttttccttttattacgatgatgacgggagaaaaaacctttactgcaactgcatttttatattccagaatggtgctctggatggttttggcaattacttttctgtacagtttccttatcgaaaaacaaccttttctgctgtggaaagaccaaaactattctttcacattttatctgaaaaaaatactccgtctttatttaatttgtgccgttggtggagcttttttaaatcttttcatcaaaatcatcacccacgaaaatacgagtaataaaatcgcacagctttcattcatttttaaaaacaattatccattgattatttttacctgcttaacagcgggagtggtggaagaacttctgatgcgcggttatatgcagccaagaattgaaaaaatttataaaaatcaatacgcaggcattgcagtttccgcttttctattcggaattcttcacatgacgtatggaacgataagtcaggtgatcattcctttcttcattggagttgtttttgctttgttttataaaaaatattctaacattaagattgtaatcatgtgtcattttatgtacgattttgtctcactgatgatcatgaatcttattaatttcaaacatttatctgccttttaacattatgaaaatagttacatcccctgccaaattaatgaatgtggaaaattcaaccgacctgttgaaaactaccacccctaaattcattgaacagtcagaatttatacactcttatttaaaacagaaatcgccgaaatatctttctgagctgatggaaatttccgccaaattagcagacgaaaactgggaaagaaaccaaaaatggaaagcaaaaccttccgcaaaagaatctgctcctgctctatttgcttttacaggagaggtttacagaggtttggatgccaaaacattagacaaagatgcagtagattatcttcagaaaaaccagagaattctttccggactatacggattgcttaaaccttcggataaagtgatgctttacaggctggaaatgggaagaccttttgaatttgatgaatataaaaatctttacgaattctggagagaaaagataacggaacaattgaattctgaaatgaaaaagaatgaaatcctcctgaatcttgcaagcaatgaatattttaaagcggttgaccgtaaaaaactcaaccatcaaattatcgattttgatttttacgaattaaaagaagggaaactgaaaaccattgtggtttacacaaaacatgcaagaggtttagtcgcaagattttgcgcacagacgaacgcacagactttggatgatgtgaaggctttcaactacgaaggttatctcattaatgaagaaaaatcgactgaaaataaactggtttttgtaaggtaaatgactatttccgcatttaaaaaacactttaaaacagaactttccgggttgtataccgattcggaaagcacttttttaagctccatattcatggaaaaaattgttgggtttaatacttttgaccagagaagatttgcagaacaggaattgcttttggaagatgaaaaaaggcttcttgaagttatttcggagctaaaaacgtcaaaaccctatcaacacattttaggcgaaacagatttttatggaatgacatttttcgttaatgaaaacgtattaattccccgtcctgaaacggaagaactgctggaattggcaataaaaaacattaaaagttcagcgtttaatgctcaaaatttaaaaattctggacattgggaccggaagcggaattattccgttggttttgaaaaaacattttccggaggtggaagttacttccatcgatctttctgaaaaagcactggaagttgccaaaaaaaatgcagcatttcatcagcttacagtaaatttcattcatgccgattacctaaattttgatttaaaagaaaactttgatatcattatttcaaatccgccttatatcgcaatcgatgaagaacaggaaattgagcactctgtaaaaggttttgaaccgaccatggcactcttctctcctacttccgatgctttaattttttaccgaaaaattgccgaagattctaaaaaatacctgaataaaaacggacttttatttttggaaatcaatcagaaattaggaccagaaacactggatttatatgttaataattttgaagaagcagcattgattaaagatttatccgaaaatgatcgatttgtttttggaagaaagtaaatatgaatggttgatgactgtttaaataaaactctatggagttttatatgtgaagcaatcatattctggagatgcttagcgttcctgagctttagctaatttaataatgagaaaacaattggctttaaccaaagctattataaattttgaatatccgttaaacaacctattactatgcactgatatgaaaatcaattatttacaacaggcacttcgacaagctcagtgtgacacctctaatactaaatgcttgatttttagcgatgtcaagctgagcctgtcgaagctttaggttaataaacggacaatcaaaaaactttttatttaaccgcaaaactcacaaaagataactaaacttttatttaaggctgataattataaatgaaaaagttcaccatagtttttaaaaatctttgatttttattcttttgagcgctttgaatagtattgaaattcgctttaacattgtcttttgtgccttttgtggttaattctgaattagtttaaacaagtttacaacaaaaaaacacaacattttgataaattttaagctcattttttgatcttttcattttaaataaaaattcatacagattcatcttttatttttgatttcaatcaaacttaaatataaacttaacgagattttaaccaatctccgtttaattttttataacaaaatagcttttcagtacttatattgattttttggtaatccaaaatcatcagctttaattaaggttatacgattaaacaattttcaacaaatcaccccaatcattgaacaataaagggttttaaaacttttttcaaacaaatttcacaacaaaaagatttaatttaaatatttatatatatttgcgtgtaatcgattacacattattgaattaattttaaatctcttaaaaaattattaatcatgaaaaaactcttttctttttttatcctcgctttcggctcttttctgctgaatgcacaggtaacgattacgcaggcaacaggatggctggaaacagcctatgtaaaatggaatcccgtaagcggagccgacagctaccgagtgtattacacaggcggcggtttcaccaacaaaataattgataatcagttaatcagaaattacggttcgtattttcgtgcggatattttaggattaagccccggaaattacaccataaaagtagctcctgttacaaataatgtagaaggaacagccacagtttcaggttcggttaccgttcttcctcatgacagaaacggttttgcacacagcaacggaagagttcccggtgcttataatctggacggaactttaaaagccaatgcggtaattctttacataactcaaaataataaaaatacggtttcgcttaatgtaacgggagcaactacaaatccatgtgttggtttacaaacgattctggatggttttaaaaaaggatatgatacccgtcctttagcgataagattcatcggaaacatcacagatccaagttatcttctgaacggagatgcggttgtagagaataaaaatattgcagcaagctccatcacactggaaggagtcggttcagatgctctcatcaacggttggggaatcaggattaaaaatgccaccaatattgaagtcagaaatctcgggtttatgcttactgatgctgcggaaggagacaatctgagtttacagcaggataatagttatatctgggcgcacaattgtgatcttttctacggaaaaccgggaggtgatgcagatcaggcaaaaggagacggtgcgctggatgcaaagaaatctacctacattactttttcctacaatcatttctgggataacggaaagagctgtcttttgggtttaagcgaaggaacgacttcgggactgtacattacttatcaccacaattggtttgatcattcagattccagacatccgagagtgaggtattattctgcccatgtttacaacaattattacgatggaaattctaaatacggagtgggttctacattaggctcttctgtttttgtagaaggaaattatttcagaaatgcaaaatatcccatcctgatctccaagcagggaactgatgttgccaatggtgcaaccggaactttttcaggagaaaacggaggcgttgtaaaagcttttaataattttatgacgggacagactgctttcattccttacaattcttccacagcggcaagtcattttgatgcttatgtggcttcctcgagaaatgaagttttaggaaccaacattaaagcattacagggaaacggaacgtacaataatttcgatacggacaatactttgtatgttaacgctctggttccggatgctccagcaactgcaaaagacaaaacaacgcaatattccggcagagtttccggcggagatattaactggactttcaataacgctgttgatgatacttctgatgccgtaaatacaggattgatggctttgctgcaaaattatacgtcttcgcttgtatcggtacagggagaaactgccgctccggtaagctcacagactttaacgattgcctccaataatgatcagaccgtagcttcgggaagcgcaatagctccgatggttttcacatggggaggaacagcaaccgatgctacggtaacgggacttccggcttcgggaatcagctttgttaaaaatactacggcaaaaacaattactgtttccggaactcctacagcagatctggattttacgataaccacagtcggttctgcgggaactccggtttcaggaacaggcagcatttcgattacgccaacaggaaccaatccgcagggaaatgaaattcacaatttcacaacatccaatttaacgagttctttctatacctttacgtctgcaaatatgaattctacggatggttctgcaacctataacggattaactttaacgaaaagattaaagatagaatctgcaacgggaattacttatacaacttctgctccgtcttcgcttacacttgtattcgatccttcttttggaggaacaattaaggtggataatgtttcttataccgcttcatcaggattggttactattacaaatattccggcaggttcgcattccattaccaaaggaagcgtagcaaatttattctacattaaaacagaatatgtttctgccactattttagcgactcaggaaaataaagcatcccagaagttaacaatttatccgaatcctatagaagattctttcagtatatccacgaaagatactgtggaatgggtacagatcattaacaacggaagtgaagtcttaaagaccatcagaggaaatataaaaaatgtagatatccgcgaacttaacagcggtatttactttgttcagatcaaaaccaataaggaaatgatttatcagaagattattaaaaaataaaatcaggtcattaacattctgttgagccgtctcatttttggggcggctttttaattttaaatgtaaagatttattcctgaattaattctgaaatgatgcaaggcttaatctgcattaaaaaaaacgattaattattgaagcagcttaaaaaattttactgataagaatgtaaagaaattcaagactaaattattcggtatccaagaaaaaatacttaatattcagtcttttatactctttgttgagtgtttttgcctcactgaagtgtcttttaaggtgaattttgattcttttattatcaaaaatcagtcttttacactcaatttttagtataaaagactggttttacactcaattaaaagatttttatctgtcttgaagttcaataaaaagcaatgaaccatataattcattgcttttaaatttatctgtaaggaatctttatccaattcttttcttcacaaaaatctcataccccaaataaattaaaggaagcgacatgattccaagatacattgaattttcaatcgccgcctgtggctgattggcaacggcataaataagtccgaaaaacgcgcctcctaaatgagcggcgtgaccgatattatcgttgtgattcggattcagcatcatataaacagaatagctgaaatacacaagaccaaatatatatcccggaattccgataggaatgaaaaacatatagatttctaaatgcggaatcagggcaatggatgcgaacaaaatccccgaaactcctccactcgctccaatggcggaataccaaggctgtctttgataaacaaatagcgaaaacatatttcccagcaggattgatccgaaatatatgatcagaaagcccagatttccaaatccctgaataacaaccggaccgaaaaaatacagggtaagcatattaaatagcagatgcataatatcggcatgcagaaaccctgaagaaagcaaacggatgtattctttcctgttaaatatggcgcctacgctgaatttgtatttctcaaagttggcacttcccatgggagctgcaaaactgataacagcggttatgatgatgattgctattaaaatattcattttttcaacatttaattttctgtattatcgtcattctgaaacaggtttccaatggttccgtcttcatcaaatcccgccataggctccggatcttcatatacttccggctcttcttccacaggttcaggaatgttgatattgatggattttaccttgaatttggtaaactggtttccgatggctttgattccttttacggcaataaattcatcgatattcacttcttccggctctcgttctttgcctttgtcttttgcgaaaataatttcggcagtggctccgttggcaacaattacattttcaatgaacgattttgaatgctccgaaggcataaaagtctgcacattcggcgtattttcaaataaaaaccgtttgataaaataaatatctttttcaccatcataataaatacaggttaccggctgattcggacgccatttttccagcaccagatattcgtcatcgaagcggtttccgagatcaaaggaaactaattttgcttctccgttggtgttgatgattaaaattttatcatcccctttgaagcttcccagtaaagtccctcttccgtctgcattcagccttctcaccgtatcatcaaaccaaattcttcgcggtgctaatgtagaaacgccttcttctttcagatccactttctttacggagtatttggttaccagatttcctttggaatcacgacctttaatcgccagttctgagaaatcgatgtccattttattttttctgattcttggattgggtttcagaagaactgtcaccgtttcagcttctccgtttggatttgccgaaaaataaagcacttccgatccttttttatccgaagctaaaggataatctgtatttcgggtaacaccagttacggaaaaacgcttcatatagtaaggtccttctcttccttcgcggtagatcatattgtagaccgtccttttgtcgtttttcttccagatcgcaacatggagaatatcttttccgataaatgtttttgcctccacttttaccactttcatgcttccgtcttttcggaaggtaatgatgtcgtcgatatctgaacagtcgaacagatactgatctttttttagtgacgttccgataaatccttcttcgaaattggcgtagaatttttcgttggcaactgcaacttttgttgcatcaatggtatcgaaaattctaagttcagtttttctctgtctgtctttaccgtattttttctgaatgttcagataataatctatcgcgtactgaataagatttgcaaggtgatgtttcacctgctcgatcttaccttccagcgcagcgatattttctttaaatttatctaaatcgaaccttgaaattctcttaattctgatttctgtcagttttaaaatatcttcttccgttacggctcttaaaagatgtccggtatgaggtttcagtcctgcatcaatggttttcaaaacatcttcccatgtttttacttcttcaatatcatggtaaattctgttttcaatgaagattctttccaatgaagaaaaatgccagctttcctgaagctcatgaagttcgatctccagttcttttttaagcaaagaaacagtatgatcggtattcattttcaggatttcagaaacattcaggaacatcggcttatcgccgacaatcacacaggcattaggagaaatggttacctgacaatcggtgaaagcgtatagagcatcaatggttttatccggagaaacatcgttgtgaagatggatcaggatttcaactttatcggaagtattgtcttcaatttttttgatcttgattttccctttttcattggctttaataatggaatcaatcagatcgcttgtggttttagaatacggaagctccgtaataatcagggtatgtttatcgtaaggggaaattttagctctggctcttacttttccgccacggtgtccgtcgttgtattcagaaacatcgagataacccgccgtcataaaatcggggaaaagctcaaactttttgcctttcagatatgctacggaagcattgataagttcgttaaaattatgcggaagaattttggttgaaagtccgactccgattccttcaacgccctgtgctaaaagcaacgggaattttacgggaagatcgattggttcgttatttctgccgtcataagattttgcccattccgttgttttcggattgaaaaccacttcgagagcaaaaggggttaatcgggcttcgatgtatctcgccgctgccgcagaatctccggtgtagatgttcccccagtttccctgagtatcgatcaaaagttctttctgaccgattcctaccatcgcatcggtaatggaagcatcaccatgagggtgatatttcatggtatttccaacgatattggcaaccttgttataacgtccgtcttccagctctcgcatggaatgcatgatccttcgctgaacaggcttaaatccgtcataaaccgatggaattgccctgtctaaaattacataagaagcataatccaagaaccagtctttgtacagtcctgaaactttttttaagctttcgccttcatgcgagtattcttctgtcattctttaatttattaactctttttctctttattggccttaacgaccttatttaaggaaacttttaaatcactaatttctcttttggtaagatatgaaatttcatacctcaaaatggtagaaccgctgtttttgcttgagatcgtaacataaagtcttttcataaagaaaagatctacaacctcaaatttttgcagtttgtatttcgggaactcatcacttaacggtttttgcagaaaaggaataatgttcctatttctgaaatgcagagcttctccatcactgtcatattcaaagatctgccttccgttaaaataaaagagtactaccaaaataattggaacaaaaatcaatagtaattcttcttttcccaagatcctaaacttatactcttctaaaatataagctccgatacctccgactaaaagcatagccaataaagtactaatgaagctgtataccgaagttttattgcggttactaagtctcatattaatatttgtattagtggattatttgtgtttttttaaaataaagattttaattagctttcatctatgacttcactcaatatttcttttttattaatatcaggatcttcaactaccagattttcaaggataaaagtttgtctgtctggtgtattttttcccatgtagaattccaaaagctgatcaatcgtttggtcttttcctaccacaacaggttccagacggatgtctttgccgataaagtgtttgaattcgtcaggagaaatttctcccaatcctttaaatcgggtaatctccggattttttcccaattcatttaacgcttttactctttcctgttctgtatagcaatatcgtgtctcttttttatttcttaccctgaataatggggtctgaagaatataaaggtgtccgttcttaatcagatccgggaagaactgaaggaaaaacgtgatcatcagcagacgaatgtgcattccgtcgacatcggcatcggtagcaataattacctgattgtatcgaagatcttcaagactttcttcaatgttcaaagcagcctgaagaaggttaaattcttcgttttcataaactactttcttggttaaaccatagcagtttaagggttttcctttcagagaaaatactgcctgtgtttccacatctctggattttgtgatggatccggatgcagaatctccttccgtaataaagatctgggtttccccttttctttcgtttttctgatcgttgtaatgctgtctgcagtcgcgaagttttttattgtgaagagaaacttttttggctctttctctcgctaatttctgaattccggagagttcttttctttctctttctgagattagaatctttctctggattgcttctgcaacttcaggatttttgtgcaagaaattatccaacttacttttcaggaaatcaataacaaaagtccttacggtgggtccgttcggtccgatgtcattcgatcctaattttgttttggtctgagactcgaaaacaggctcttccacattaatggaaactgcggctacaatggattttctaacgtcggaagcatcaaaatttttattaaaaaactcacggattgtttttacgtaagcttctctgaaggcatttaaatgggttcctccctgtgttgtattctgtccgttaacgaatgaaaaatacgtttcggtctgagatttatcggtgtgcgtaatggcaacttcaatatcattgtccttcaggtgaacaatggggtaaagcgtttcgttttccagctcttcatccagcaaatctttcaaaccgttttctgagaagaatgtttctccgttgaaaagaattttcaacccgggattcagataggcataattgcggagcattctttcgatatactcttttctgaatttgaagtgaaggaaaatatcggcatccggaataaaggaaatctcggttccgtttctgtctgaagaatctttttcttcaaaattttctgtaataatacctctggaaaattctgcggctttcatcctcccgtcccggaaagaacgaaccctgaaataatcggaaagtgcatttacagcttttgtaccgactccattcagacctacggattttttgaaggctttactgtcgtacttccctcctgtattcatcttggaaactgcatccactacttttcccaacggaattccgcgtccaaaatcacggatcgtaactttaccgtcatctaattttatttcaattcttttaccggctctcatcctgaactcatcaatagagttatccagaatttctttcagtaaaatatagataccatcatcggcggaagaaccgtctcccagtttcccgatatacattccgggacgcaggcggatatgctcctgccaatcgagggttctgatattatcttcggaatagatcggatttatttcttgtgacatatgtaatttcagcaaacatacaaaagtacgaaattgaagaaaattatccgaatattttggttcatttttttgtaaatattctcataggtattgcattattaataatgaaattctatatttacattattcaatatcaagtgaaaaacctgctttattttattttttttgttaaaattaaagctgattatgtttcaaattaataatcttaacaacatcaataaatattatcttatggctgtctttctgtaattacctaataaaactgaaaccaaaaaccaaactcacatgaaaaataaattgaatgcctgtattattgacgacttagatgaaggcaaatacgtttcccaactcctgaaaaaggaatttcctgaattcgaaactgatcttcagacgagctgtattcttttcgcttcggactattttacaaaacattccacggatattttattcgttgatattcagaattttaaagaaaacgatattgaagcattagtgcagtttaaagaaaatgatttcccgattattctcatcacagaatctgaaaaatctgctattcaggcaataaaaagaggatttatccattacatcttcaaacctttaaaaaatctggatttcgttctcaccgttaataaagcactcgaaaaattcagaaaaaacagaacctcttcactttcaggtttccaaaacaaaatcaatcttcctaccctgcaaggatttaagcgggtaaatattgacgaaatcatccgttgcgaagcagattctaattacacttctatttatctttctgataaaagcaaagtgctagtttccaaaacattgtgtgattttgagaaaaatctttccgaatataattttttcagaattcatcacaaacacctcattaacctcgaacatcttaaagaatatatcaaaggaaaaggcggacaggtcgtaatggcagataattccgtcctcgatgtttccattcgcaggaaaaacgaattccttcataaaatggcttaacgtaagaaataatatttttttcatcttacctgtgatgttagattacaggaaacattctgtttttcaatactaaaacaatatcattcaggcatttaaaaataaaccattacctttttttgaaaagaaaaacacatttacctgcaaaaaaaacacacttactcaaaatccatccgcatttacttagtcactttagtgtgagattattatatgtgatacttttaaggtcttaactacatgtagaaaatttaatagctaaaaggtgaaaaccaaaatgtattcaatgagtattaattcttaaagtttttgttggtttttgatgtataaaatcaacttagcatcatggtaagaatgtattttttaatcttctgctttcttttaggaaacgtaatgcttttggcacaaaatcctccttgttcagattttaatgatcctgtaaatccttacggaaactgggctcccgctgctgcacccaacggaaatgtaagtgtaggtgtaggttctccgaatcctctggacggatcgcagtttcttattataaaagacaagtcgggaggatcgtggtaccagaactggaaagattaccaaaagctgggaaactattttttggggcagtgtctttattttgatttttatctggacaatgacagtggttacggattgccttatcatccatacatcacactttctgacggaaccaacagcgctacatttgtggcaagtgtaacagtaactccgggaagcggatgggttcgtataaaagctcctattcagctttccagcggcggtgttcttccaagcaattcggacggagcatggacgatgagtcctgtaaatgcggcaatttttgataacatcatcatgaattctcaggttctttccattacgccggatattacgtctacacaacaggaagtgatgtatttcgataacatctgtgtaaagccttgcgaaggatgcaatgaatgtaattctaactttaaaatccaaacaacaacaagcacatcaggaaattacaccacagctcagatatttcttgaaagcaccaattctccaagtttgtataaagtagactggggcgacggaacgacaggagatgtacttacttcgcacatctacaacactccgggaagctacacggtttgtgttatacagtttgaaggagatcaacctaagtgcaaaacctgtatttctatttgtattccgaaacctgcggaaggaggaaacgctaaaaacccgggcaatttgaaatctcctttaaaagatgttgcagaggcagcaagagcagagtctggaacagccagtcagccggagtacaatctggttcccaatcccgcaaaaaactatgttgatgtacagactaatctttccaaaagaggcactgtaaccgttaaaataatagatacttccggaaagattctgattaataattccgaaacggtagaaagcggaagacaaagtattaaaatcaataccgaaaaactgattcagggaacttatattgttgagatacaatccgagaacgtaaaatcttcgcagaaactgctcataacaaggtagcgcaattcatatctttaaaaaagccatccgaaatcgggtggtttttcttttgaagtacttctttaaggacattttaagtatttcattcatgctccaataaaatatctttttgcgtttgtggttaatttaagccaataaatctctcctgattgtaaaaaataaattaaattcgatacaagaaaaaaaacaatccttaatgatacaacttcctttgtccaaactttccaatgtgggaactacgattttcagtcaaatgacgcagcttgccaatgaaaatgaagccatcaatctatcgcagggttttcccgatttcatgccggattccgaattgctggatcatgtggatcatttcattaaaaaaggctttaatcagtatgctccgatgggcggaatgattggtttgaaggaagaaattgccggaaaaatagaaaattctcatcagacagtgtatcatcccgattctgaaattaccgttactgcaggcggaactcaggctattttcactgcaattgcgacttttgtaaagaaagaagatgaggtcattatttttgaaccggcttacgactgttatgaacctacggtagaacttttcgggggaatcgtaaagcgtttcgaaatgaaagctcccgattatgaaatcgactggaatgtggtaaatagtttagtttcggaaaaaaccaaaatgatcatcctgaataacccgaacaatccttccggaaagattttaaaggaacatgacattcaggaattaattaaaattgtggaaggaacttcgatcctgattttaagtgatgaagtgtatgaaaatattgtttttgacggaaaacagcatttaagcatctgcaaatatcccgaactgaaaaacagaagccttttagtggcttcattcggaaaactgtttcatgtgaccgggtggaagataggctattgtgcggctccgaaatatctgacggatgaattcagaaaaatacaccagtttaatgttttctccgtgaatacaccgatgcagcttgctttggcggagtatatgaaaaatccggatcattacaatcagcttaatcagttctttcaagaaaaaagagattttttaagacagggtttagccaatacttcatttgaattactggattgcgaaggaacgtattttcaagctttaaaatatgataagatttcagacaaaagtgatcttgatttcgcgcacgaactcacgattaatcataaggtagcaagtgttcctttctcttctttttataaaaataagctgaatgaaaatgtaatccgtttgtgttttgccaagaagcaggaaactttggaaaaagctttggagaatttgtctaaactgtaatttcgttgatcgttgatttagcaaataagaagacttaaaaaagctaatttaactaattttaaatttaaccacaaaagatgcaaaagactttattggatttatttagagtatttcaaaagtctgcaaagagaaaaaatctttgatttttttaatacttatgtgcttttttccatttaagtaataaaaccgcttaagtcttttgcatcttttgtggtaaaaaatctaaacactataaaaacatacctccggaagcttcaattctctgtccgttgatccatcttgcctcttcggtacacaggaaagccactattccaccgatatcgtcgggaactcctgctcttcctaaagcggtattattggcaaccatagtattgatgtttttatcatctcttgttcttcctccgccgaaatctgtttcaatagcaccgggagctacaacattggatttaattttttttacgcccagttcttttgcctgatatttcgtaagcatgtcaatcgctgccttcatagaaccatacacagaagatccgggtaatgcaaaccttgccaaacctgaagaaacgttgatgattcctcctccttcattcataaaaggcaaaaacttctgagtcaggaaaaatactcctttgaaatgaatatccaccatatcgtccaactgctcttcggtaacctccggaatcgggcaatataaagctgttcccgcgttgttgatgagataatcgatatttcggctgcctgtattttcttcaagatgatctccgaccgttttcacaaaagcatcaaaacttttcacctcttttgtatccaactgataagcaattgctttctgtcctaaagactgaatctcttctactactctatccgcttcttccctgttgcttttataagttaaaatcacatcaagacctttctgggcaattttaatagcagaatttcttcctaatcctctgcttccacctgtaattagtgcaatttttcttcttgtttccattatttaatgatttattttaatgagacaaagttcagataatttacggttcaggcgtttgctttattcaaacttaaatttgcaaaaatcaaatcatgaccggaattccaaaggagcgagagatgttttctttttgaaaaagttagagaagtgtgcaatctcttcaaatcccaaagcatatgaaatctcggaaacattccattttgtctgtttcagaagaatttttgcttcctgaacaattctttcagcaataatttcggtagttgtttttccggtactttctttcagttttttatttaaataatttacatgaaccgccaatcggtctgcataatcttttgccgttttcagttgcagtctctgatccgacgattctatgggaaactgcctttccaacagttctataaacagagaaacaacacgcagtgaagcatcatttgacgttgataattttgaagccggctgcaacttttgtccataatgaacaagctccagaacataatttcggataagatcatacttaaaaatataatcggaattaatttcttttttcatcttatcaaacaggagttcaatttcgtctgccaaatcatcctcaatttcaaaaagaggaacatttcccggctgaaagatcggtaaatcttcaagcgtattgtgtgatttgtatttaataaaaaaatcttccgtaaaaacgcagaaactccccgactggagaggatcttcgggaatccaatgatacggaactttaggagtcgcaaataaaagtgcattcccttttatctgaataattttatctgcatattccgctctgtttctgcctcttattaagcttatcttgtaatatttccttctgttataaggcatttcggaggttgttttgattttttcaatcgttttggcgatatcaaaaacattgaaatgaccaatttctttatgaagccctttcggaaaaatggtttcgagatctgttccgagtttcgcggtcatttctctgtaaaaatcatccagcgaagtgtaagaagtatgctgtactttttccatatctaagaatttgtaaaattcaaatgtacggaatattctttctgaaattcacaacaatcattttataaatttatcaaaccaaagtgatttatattgaaatattttataaattagcaattgtcaagttaaaattttattcaatatgaaaaatcaaaatttaagcaacggaaaaaagcttaacaaaaagcagctaagatccatcaagggtggactacaacaatgtgttgatccggaaacaggactttgtaaagcttatggcagacgttgtgcagaacctgaatgtttcgaacttccttaattctttaaaatcatcattatgaaaaatcaaaagttacaaaacggaaagaaactgaataaaaaacagttaaaatctattactggcggaaaagaaatatgcacagatccttttaccaaagaatgccttaaatacggtattggctgtgtagaattaaaatgccaactcgttgatttataagctattaaaataaataaaaacgcttcgaagcaatgctccggagcgtttttcaatataactaactttaatactttattcttatacgttgaatctgaagtgcatgatatcaccgtcttttacgatgtattccttcccttctacagaaagttttccggcttcttttacttttacctcagaaccgtagtttacataatcatcatacttgattacttctgcacggatgaaccctttttcaaagtcggtatgaattacacccgccgcttgaggagcagtccagccttttccgattgtccatgctctaacttcttttactcctgctgtgaaataagtctgtaatttcaatagatcataagcttttctgatcagtcggtttactcccggctccgtaagaccaagttcttcaaggaaaatttctctttcttcaaaagtttccagttcattgatgtctgcttcgatctgagctgctaaaacaacgacctctgcgccttcatttttagccatttcttcaattttaccaatccattcgtttccatgctttattgaattttcatccacgttacaaacgtaaagaaccggcttattggttaataattgaacatctccgataatagatttcgtaaaatcatctgttgcaaattctcttgcatttttaccgtcttctaaaaatttttgaagactctgaagtgtttcataagccagaacatcttcttttttaccggatttgatgaactttttagctttctcaactgcttttcctaccgtttccagatctttcagctgaagttctatatcaatgatttctttatctcttaacggatctaccgaaccttctacgtggacaatatttccgttatcaaaacatcttaaaacgtggataattgcttcacactcacgaatattggcaagaaactggtttcctaaaccttctcctttacttgctccttttacaagtcctgcaatatctacgatctctacaaccgcaggcaaaactctttcaggttttaccaatttttccagctcaaacaatctgtgatccggtactgaaacagtccccaaattcggttcgatggtacagaaaggatagtttgccgactgtgcttttgcgttgctcagacagttaaaaagagttgatttacctacattcggtaagcctacgattccacatttcataacgaaatttttattttatttataatgctatgtaacctttcggtttcatattgtaaaattctaattttgaggtttattgttcaaattaggagtatttccaatctgaactttcagcgtgcaaagatagtgaagttaattggattaaaaaatgattatctataattagatctttggatgaaatcatataaatctttaatgatcgaaacaattttgggatttgttttaaaatcatcccaagaaatttcacccttttcagtcagctcaagaactttatagctgacctcggatttattaatgagcgttccatctgttttatcccatattttatttaactctggaatatcatctttaatactgtttaataattttccaatgtaagaatctttataagttgtctcttccttcttatttaacgagtctgaaatttgctccttaactctttgaaaatcttcatcttctcttaattttcttttatcacagaaatttattaaaattttgtcccaaactttaaacggtaaaatattttctatttctttataatctttagttgtttgatattcgaaattattattgctttttgacaattcttcatagactttatgcttttcatttttataacttccatcataatcagaaattaaaaatattctgttattaattgaaaatgcatttattttttcttttaactcgacatcatcaaaattataatgatcaatgttacttccggcatattcaatgaatgcaaattcaatatcttctttaggaaaaggcaaatcaaaggatttacaatatgctttcaaaaatgcttttaaataattcctatctgaaattccttcaacccaaatcgagcagttcgcaagaaatacagaggaatttgtaacgcctaaatattgtaatgcggagttatctccatgattaacatttttaattatgaatttgtctttttctgctttattaaaaagaaatatcgatatattgtctttctcaatagttaagtctaaaaaatgattggaatgtgtggaaatgaagtaggtaagatctttttccttaagatagtcattgttcgtaatttgctctaaaaataatcgctgcattcccggatggagatttatttcaggttcatcgataaatacatttgatttattttcgcatgtataaatcttatacatcaaaataaataatgcctgaattccatctcctaaatcatgcagatcattacttgttccatcaatataaacgttaattaattctgaatcatcttttccttcatgcttatcgtaaatattaaacttagcaacaatttcaatcttttttttattaaaaaaattctttgataaaaactcttcaaatctttcaaaagattctcttttatcttttacatcatttctaatattcacaatctgataatacaaatcaagacctgtaaatatttctatattttcattttttaaaccataactttttacaattgtatccttataaatatcatttgaaatttttgaatattgagttccctcttttttctgaaatattgaatgagcagttcttaaagtcggaataaaaacttttttactttcactaaaaaaatttttaaaaaataaactttttaagctatgtaataaagagtaaatttcatttttactttctccagctaatcttgtataatgataatctccataataattattagataagctattataatgatcagtcagaaaactaaatattttaatattttcatcaatgctttttaaaatagagttttgatccgaagaatattctatatttctaaataaaacttctcttttatcattttgttcagaaagaaaataaacattattatgtctattgtgccctccaaatttattttcagcaatgatgctgttaaatttattgatattacttttgattaaagctttgttttggtaaaaaacagttttagcagtcaacaacttacgcatcagtctactttttccactattatttgcacctataaaaacgtttattttggatgaatcgactaatctttcaagactcttttcattttcattatagtaagaagaaaattcttctgcttttggaaagattaaatcaaatttattgctcatgctaattagtttttacaaaaataaataaagttaatttataaaaaaatccgtcaccaatatgacggatttcaataatttaatttcaaaaaagattattaaggattatctcccgttgcttcctgcgccaaaggaacatctcccggagtttcctgtaaagttttatctaaggtaaataaagattcatcagatgctctgtctcctcccgcaatttttaatttatcaattaaattctgtgccagtgtttcctcttcaatctgctcctgtacaaaccactgcataaagttccatgttgcccagtctttttcttcaagagccatatctacaattttataaatggcagtggtgttatctacttcatgtttgaaaactccttcaaaacaatcggtaagcgattccggatctgccggaggagcaggaattgcatctactttcggctttccgcctctgtttaatacatattccatgaatttgatggagtgatttctttcttcctgagcgtgtctgtacaggaaattcgcaattccctgatatcctttatcgtctgcccagattccgtatgataaaaaggtgtgtgaagcgtgaatttctttgttcatctggtcgcttaatgctttttcaatggaatcggaaagtcttttggtattcataatagatattttttgtgattatgaatctatggatacaaaaatgattccgagaagtttttatttttagacataacattcaaacatattcacaatctcctgaattacaatattttaagccaataatttatagttattctaaaatatgaagctgaagttttcatataaaaagaaaacttccggtataaaaacggaagtcctctctaaaaaaattatctctgtactattgctttatcaatgttttggtaagcgactttccttttcctgttatttttatgaaataagtcccagccggaaaatgaccgacattgaatttttcatagtaaacatcgtcggaagaattgactttttttgataaaatcagtgatcctttcgcatcaataatttcaatcttcatttccttttcctttgatttcaattttatatttacctcctgattcgatggattgggataaatcataaaatcattcgttgtaatctctttttcttcggcagataagcttccgttggcgcatagcggaattctgttgattccatcaattccccaagatggctgaacaggaatacaaagccagttcaatacagtcggcaaatgatctgtttcccgggttgtcgataaataattataaattttaaaattagtaaccgtgttcagatttctggcgggagatccggtaatcgtaacggtgtttgcattcggaccggaatctgccagtgtatttcccgaaacctcatcacatttccagttagcaaccaattgagaataataaggatgtgaaaccgtaatatcctgatttgcccaattcacgatgacctcattcggaagcgcagatttccacactctgatgtctctgtaggaagctgcaagcgttggactgtaggtgttcgtcccgtcctgattgatcgtaaacggaagtcccgaatcaatatttccaatggtattcatttttgcaaaagttacgggaacgccatcttaatacatcgttacaagtccgtctctgtcgaaacttacggcaatatgcttccatgtattaagttccatttttccgcccacaagatcaatcctgttggttccgtcgccaatattcattttaaaagtctgtccggaatatcctgaaattacaaaacctttgttctttccgtttgcccagtttttattactgatcattacagggtcactggtgtaggcaacgttcggtttcacccagaattcaattgtaaaatcctgagttgctccaaaattaaatggagcctgattcgcaggttttgcatatgttcctgccggaagattgagctgattgaacgttttagaagattctgaaatggttctgctgatttgctgaggagtaaaattaggattagaatagatggtaaaaatattcctttccgaaagatttccgcctccatgaccgctatctaccgcgccgtgatccgtggttaaaacaaccagccagtcttcattactgtacgttgaacggcttttcatggcgtttacaatttctccgatgtaagtgtcgatggtttgtatagcagaaacatactgcggtacagaagacgaaaaaccataagaatgtccggcgtgatccacatcgtcaaaatcaacaaacaaaatgtccggattatcgttttgcattgaatttacagccgcattttttactgcaagatctgttgtgaaattagtctttacatcggcgttctgaacaatggtattgttaaccggagcccaatgagccagagaaatggttcttaaattgggattatacgcttctgctctcgttaaaaagtcagggtaatttgcatagttcggactggtaaaattattgtcctgcacattgtgtttcgtatgccatactcctgtaagcatcgtgctccagccgtttccgctcaaagtaattgcagcacagagtccgtctaaagaataaattgactgatctgccaatgcatgaatgttcggcgtaccggaagacatcataacatccgcccgacaaccgtcgatcccgatgaaaagaactttcttcgtctgagctccgagaaaacagctcattacgactgccattgaaaatagttttgctttcataataataaatgggttttgaactttaagattttacaaactttaggttgattaagtaattaaaaaaagggatgttgggaactttgggaactttgtcaaagtttaaaactttgacaaagttgatttcctggatttcagaaattaaaaaaagaggctgaattgggataagcgtaatttgaaagaattagtaaaaaaatcgttcagcctcagaaatcgtgttaaaaatataatcgggattggatttttcaagttcagccttgctttgcgctccggaaagaacagctactgtaactccgcagcctgcatttttgccttcttcgatatcaatgacagaatctcctgcttttaaaactttttctggttcatgaatattaaattttttcatagccagaagaatcatttccggacttggccggctttccgaaacatcgtcggctgtaattaaagcatcaaaatgcgcattttctttccaacccagtttttctaaaagctgtagggcaatttcggaagtatagcctgtatttaaaacaatctttttatcctgagttctcatcttgatgaggaaattttcaacgccgttaatgggttttacctctaaattctgataggctgtttttaactgatccgaaaagctttcaaaaatggcagccgcgtcctcttcatttccgcctatttcttttagcagactgctgatcgcttccagtttttccattccggcgcagcttaataaaactttttccagagaaacgctgtatccgtaatcattcacggctttcattaacgttttatataccacattatcttcatcaatagtggttccagccatatccagaaccagtaattctatgttcttcatttaattttatgcgtaaattttatctatattaaattttgaaaagcctccgcttcccgtcattccctttcctccgattcctgttacaacatgaatgttgggagacggactgtactcgaaaatatcttttgttttgcactgggaatacactccaaaccatcttctctggatttcataggtcggaagatctatgattttctttgcttcattaatcataaattcatctatttccatattcaaatcaaatcctaaatcatctgcatttttcgcatctgcatattcatgggaatctcctaaaataaccgaaccgtccaaagcctgtttgaataaaatatggactccgtattttttctcaaaggaattcgggtcttccattgatttgatttttttgaaagacggacattcttcaaaggactcataccttctgatggaaagtccggtgagaatatttccctgaagctcataaattccctgtggttttgtctgaagcatctgcagtttgcttacttcaagatcactttcgttaaaaacttctggaaataaggttttaaattcatgtccgccgcaaatcattatttttgaggcgttcagtgctgttccggctgcagtaatggcaatacattctccgtcattttcatgggtttcaacaatggttgtgttatagaaaattttaagatccagtttttcctgtagaaaccggtgaagttttacaatcatttcagcagaatctaccgataattcctgagggaaaaacaatccgcctttgcagtaatctgaacgaagaccatcaaatttgctgatacattcgctttttgacagaagaacagattcataatcattatttttattgatttcatgcagctcattaattagctgaagctcttcgtcattggatgcgatatagacagaaccgttttttcgtaccgtcaaatcagcctgaagctgaagttcgttatacatggctaaactttctcttccgaagttctgccatttgagatccattccggaaggtacgacctgtccgaaatttcttaccgttgcttcttgaggaatagaatttttctctattaaagcgactctaagtccttttttcagcgcatgataggcatgaaaggttcctaaaatgcctcctcctacaacgattaaatcaaattttgttgtcatttttactataatttatatacttttcgaaggatcgaaactgatgtacggttggttattgatttcattttttcctgattttcttctgaatgcgaccaatgcgatgaaggaagaaaccagcacaatggctacgatgatgtagttcagccggatataaaaattcagccatgaagtctgaggtgagccgaaatttttgtaaagcagaatcagaacgcttcccagatatccgaaagaatcgacaagatagatcagaaaccctacgtttcctctgatattgaaagcagcaatcatcctgtcgaaatacattccgttgaacgggatataacagaggtacattccgaaacctgaaagaaccatccataaaaaaggcgatataacagtgctttcaaataaaaaggttgaaaaacctacggttaaaattcccccaaaaagaagataatgatacaaggcaaaagcttttctgttgtttttgatctttaccataaaacctaagatcagaagcaccataacagcaatcggcatttccgttaaggtaaagacagaactgctgaatctgatgtgcagattatcccagatctcgcgattgaaattatctctgaagtcccttaaaaccgtaagacttacgtacaacaatgtaatgcagaccatcggaaccaaaaactgctgaatgattttttttctttctgctttattaagcggctctcttttgttttttaacagaatgtcttcttccgtaggttgcggaagtttttccagcatcagtccgaatatgagcaacggaatgatgaatagcaatcctgccgaaaagggcatccagaattctgaaatatggaaggtatccattaaaaactttcctgcggattttgtaaatcctgaagaaaccacaaagctcgaacacaaaaacaatccgatgatttccgttgttttccttccttcaatataagaaaaaacgattccccagatcatcccgagcggaatcccgttaatgaacatacaaagaatattgtatggagcgggaatgacggcaaaacccagcaaagcaatttctgcaactgcaataaagatgaataaatagaagatccttttttccggctttaattctgaaataaacttaattccaagaaattttgagataaaatatcccataacctgcgcaatgattatcaaaactttataatcgatcccgaaataagaaagttcttcgaaggaggcgactgtaaagggtttccggaaaccatacatacaaaagtacactccaaattccgcgaaagccgctttcagggttactgctgtttttttattgaccgcttttatcatgatgaatcggttagaaattaaattttattcccaagttgcatcttaccccgtaatattcaacctgttcgggacgggtttcgtcttttccgaaatggtagatcagcggtttattcagaatgttgttcacgtctgcatataacatgagatgtttggtgaactgataggaacctccgaaatccagactgctgtatttgccgtagtaggaatcattgatatcgtcttccgcatattccacagcatatttccctttgtaattgtacgccagtcttgcgttgaatccttttttctcgaaaaacaactgaacattgtataattcttttgcctgataaggaagttttacttttcttccgcctggttttaccatttcagaatccatgaaagtggcgttaagctgtgttccgaaatattgcaggaaaccgggtaaaaaatcgaatcttctgttgatgcccaattcgattccgcttattgaagctgcttttccgttattcggcgcggtgaactgtactccgtttattccgttgtagtttccgatgaaagaatcctgaaaaatcgggtctgtaatggatttatagaatactcccccactcagaattcctacgtttgaaaagtagtattctcccatcagatcaaaattcaaagaataggtcggattcagattcgggtttccacctttgaattcgttgtccgcttcgctgtatgttccacccggcgttaaatctccgaaattgggtctggaaaatgttctcgtggcagcaaaacgcagatttattttatcatttacagcgtatttaatatgcagcatcggcaaaacggcaagatatttttttgtgttttcaacaggaactaagctattgttgattacattatatccttttacttgcgtattggtattcgataatctgatccctcctaaaatagtgatcttgtcattcactttatacgttcccattccgtaagcatcggcgtgtttttcaaagacatcgaaatttcttccgagtgctttattatattccagagcttccgaatcggctgtattgatctttaaatttccctgattctgcaaccagaactgatccattcccgatgtcgacagaacaggaccgaacgtattcccgatgtgggtgttcatttcgcttaaatattgagttccattcgcctgactcgtaatatattgtccaaaatctgataaaagcggtgccgttccgttgttccagttgtagaaaatatccgagaatctggcattccgttctttatccctgtatttgaaaccgtattttaaggttaaacggtctgaagcattgatctcatggttaaaagcagcgacaatcttatccttttcctcaacaaagactttgtaaaattccagatcggtaaatctcattttggaagcatccattttaaaatttggatcgctgtaaaagccaaataacgcgtccggatctttatagtctaattttccgccatcggctttccagtaagctctcggaccgattccgtgattggcaatataagcaggatcaattcccactccggattgggtatacttgatgacaaaataggaattgttctgtttatcaggaatgtttccgtatttgaatttattgtcataatacgatagatcccagtcgatcttccctttgtttaactgatgaactgcgcctaaagaaaccgaagttaattctgtaatcagacggttatggatgttctgcaattccactcttgcggtgttgttggcggagctgaatttatcaaaacggattctgtgtttgtagtgcgtttcatcatcagacagcgttccgtacattcctttgagataaaatgtggtttttggagacagcacatattcaaaagccgtgttgattcctgtcgtttttctcactccgttgtaatcgcgaagctctaacctgaaaacaccttcatctccgcttcttctcgcttcaaaattatcggtagaccagtttcggatgaagtgtgcaaaattgaataaatacccgaattttttatcttttgttcttccgccgtaaagcagtccgatgttgtagacacctttatcagatttagcattgtaaccgcttcccagcgtagccttgaactcggttttcatgggtggtgttttcgtaatgaaattcacgccgcctccgattccgtcggcttccatatcgggagtgaaagatttatttacatgaacataagagataagttctgtaggaaaaaaatcgaaagcggttgctctggaagtggtttcctcttccgcagtcggaagtctgtttccgttgatggttgttgatgcccagaatggcggcaatcccctcagagaaacaaatcttccttctccctgatctctctctatggaaactccctgtacacgctgaacggtttccgcagcatttcggtcgggtaattttccgattccgtcggaagcaataacgttggaaatattgattgcgtttttctgaagatttaaggctcttgcctcactgtttttcagagatcccgtaacgatgacttcgtcaatgtttttttgtttctgaagcatggagatcattcccagatccatagtctgctgagacgtcaaatctattgtaatattctgattttcaaaaccaatataagagatctgtaggtcataatgtcccggtttcagatcattgacagaaaactttccttccaaatcggtcatgatgattttggaggttccggcaatcttcacggcagctcccggaagcggctgattatggtctgaaacaattcctgtgacgatctgttgctgggcggagatgaaaatactgcaacaggcaaaaatagggaatagagatttttttattatcggctccattgtttacatatattaaatttatatcgcaaaacaagtcaataattttaatatatgtaactattttatattaagtaatatttaataaatgaagcagaattgttacctcagttttaccagcaaaaagtaccgtattcttcttttatattagaaaaatatcagtgttaataagtgtttcggaagaaagaacacaatatgcaatgcatatctgtttaataaaattttcaaaaaaacaaatgcccaaagattaatttaaagttaaatcagaaggtttgataaaaaacagaaagttgagtatttgtaaacttttatgaaaaacagtaattgaatatttgtaaataaacaattaaaaaagagacgtaaaatttatcctgagtaaaaatacaaaaccagcataatacagctttcattactgatgctcaccggaacgtgcgggaattttccgttaaaataaagagaatctccttcttttaatatcacttcttcattatcgatcagatattttacttctcctttcagaatatacttgaattcccatgcatcagttattactttttctcttttggcattgggttcaagggtgagtaaaaccgcttcaaaacctaaagaatgaaggcttttgctgaagatatgcatgtatttaaacccttcggcttccacttctttttcaataagctgctggttttctttgggcaggtaaatgaattttgcgtttgattttttctcaaccccttcaaaaaagtaacttgcatcaatttccagagactggattaaatccaacagcacaggaagcgaaggaatcgttcttccgttttctattctggaaacgagtccgttgcttacattggctctgaaagctaattcgttaatggttaaattattttttttcctgatgtctttcagtctctttccaatgcctattaaaaaatcattcatatcatttacagttagccagatccggttattatatgcagaagcaaatttactatattaaatgacaattcttcccaactatccggaatttggggggaaatttaaaccacaaaaggcgcaaaagataatgataaagctaaatttcaaaataattaaagtactcaaaagcataaaaatcaaagatttttaaaaactgttattttcttttattcttacgcttgttaacttttaaaaatgtatcaaaatcttttgtgactttgtggtgaaaaaaaagccttcttaagcggcaacactgtcattttgagtaaaaaaaagtggagtaggaaaatcaaaataatttcaaactaaagattcttcattgcataatgcttcgcaagttccattctgaatgacaggaaaatttaactacaaaaggcacaaaagataacgataaagctcagtttcaaaataattaaagtcctcaaaagcataaaaatcaaagatttttaaaaactgttgtgtgcttttattcttacgcttgttaacttttaaaaatgtatcaaaatcttttgtgactttgtggtttaaaaaaagctttcttaatctgcagtactgtcattttgagcgaaacgaagtggagtcgaaaaatctaaaataacttcagactaaagattcttcattgcataatgcttcgcaaaatttcattcagaatgacagggaaatttaaccccaaaaggcacaaaagataatgataaagctcagtttcaaaataattaaagtcctcaaaagcataaaaatcaaagatttttaaaaactgttgtgtgcttttattcttacgcttgttaacttttaaaaatgtatcaaaatcttttgtgactttgtggtgaaaaaaagtgcttacattttcaatcaataaaactgtcatttttaagagattcttcattgaatattgcttcgcaaaattacattctgaatgacaggaagatttaaccacaaaaagcgcaaaagataatgataaggctcagtttcaaaataattaaagtattcaaaagcataaaaatcaaagatttttaaaaactgttgtgctctttttattcttatgcttgttaacttttaaagatgcatcaaaatcttttgtgactttgtggtgaaaaaaagtgcttacattttcaaccaataaaactgtcatttttaagagattcttcattgcatattgcttcgcaaaattccattcagaatgacaattttactgttttaaaatataacacattagtcacataagtttagtttgattaaatattttaaaagatcacataagaagaaaatcaaagattttcgtaaactaatgtgttctcatataaggtttaaaaattgttttaaaatcttatgtgactgatgtggtaaaataaaaaactcagcaaccttattaagactgctgagtttatttatctgtatttattaaaattactttattttcttggcgatatagtcgctttcatttcctaatcggtcaattgctttgatggcaactgcattcagcacttttccgtctttatttttaggaatttctctggaaagctgatccagagtaaggatttcagtttcccagattccgttgtactgggtaaaaagcacccattggaaaacttcttttatattttttacgctccagcttatctgcgcagaatttccgttgttattgatgaacaaagtcggggtctgcaaaggaatagcttttatccatgacgtttttggaaccaacgctttttctttatagggtccgtttttcagggtcggaagcatgttggcatttttggttaaaccggcaatgctccagtgaatttcccctgcatctttccctaaaacctgtcgcgatatttcgatctgatttttaatttcggtcggacggtctgaagttttaatttccaccgtattcaagcccggccaaagatgtcggttcatagtgttttcagatttccaccagttcaataagccctcaaaaggctgtcctttggattctatcggccagtacaactgtggcgagaaataatctacccagcctttatttaaccataatttggcatccgcatacagctcatcgtactgagaagaacctgtgacaccttccggataaccgggtttccagattccgaacggactgatcccgaatcgcacatagtttttttctgcgtggatttctttatagattctttctacaaatttattcacgttatcccgtctccagtcggctcttgttaaggttcctccgctgcttacgtacgcattccaagttttattgtccggaaaatcggctcctttattataggttgcgtaagggtaaaaatagtcatcaaaatgtacggcatcaatatcatatcttgttacgatatcttttaccacattcgaaacgtgtccctgcgttttcgggtcagcaggatcaaaccagtacattccgtttttcaggcggatgacgatgtcggaaagcttattcaccatagataaactgttgggtgagcctccgttcgaatgatgggcgcggtacggattcagccacacatggagttccagtcctcttttgtgggattcttcgatccagaactgtaaaggatcataattcggataaggagcggctccggtctgtccggtcaagaaatacgaccacggttccagattactggtgtacaaagcatctgcggaaggtcttacctgaaaaataacggcgttgaagttattgtctttcagcatatccagcatggaaatggcttcggctttctgctgatcgacggataaattatttcttgaaggccagttgatattggcaacacttgcaatccatgctccgcggaactctcttttgatttccggaagattggttctgaaggtgtcgtcattcggcggtactgccgaagaatctgtactggtaataggaagcggcggttttggtatgttgggtttaacggaattttttacgggagtggaagctttcactgcgctgttctgtgtggaacaggcaacaaatgatgtaaaaaatcccgataaaacgatcatttttagggtattcattctcatagtctgcaaaactacattaatttattttgttgattttaaattacgataataaaatgaattatttgaactttgatttaaattattaatgttttaacaggaaagtaaacaaagttttttgactgctatctgttttaggtttgctaaggtatttcacttaggtaaactctaaatgatttccttacttatagatgttttaacctcatcttaaaaagtcgtttaaagtaaaagaaaactctataaagtttttatctgtgtagaaaacatattcacaaggcgttctacgttccgtaggaacgctgtctttagaaaatttatcgcagtatagatatcaatcctatggattgattgacagatttattcttatttctacacagattctgctcctaaaggagcaaattcttttactttaaacaacttctaaattttaccgcaaaagacaaaagactttattggatttatttaaggtatttcaaaagtctgcaaagagaaaaatctttgattttttttaacttgtgtgctctttttttccccatttaattattaaacttaaataattaaagtgttacaatcttttgcatcttttacggtaaaaaagtgtagacaagttttatattgaattctgactaaagccagaatttttaccgaatatttaaagcgagtaaaatcccctcctattttgattaatttctaacaagattcttcatttcataatgcttcgcaaaattccattcagaatgacagattgaattttaaacatcctcttatttaaaacaaaaaaagccccgaaaaaccggagctttgttattataaaaactgaattaagctttagctgctctttccactttttttctgtcttcttcagaaagtaatttctttctcatacggatgaagttcggagttacctcaatggcttcatcaccctgaatatattccatacattcttcaagagagaataagattttcggagcaactcctgtatctttatctttacctgctgctctcatgttgttcaactgcttcgcttccacgatgtttaccacaaggtcacccggtttgttctgttcaccgatgatcattcctgcgtagatttcctctcccggatctacgaagaacttacctctgtcctgtagtttgttgatggaatattctgttgccggaccttgcgttttgctgatcaacaccccgttatttcttcccggaattgctcctttgaaaggtttgtattctgtgaaacggtgtgccataatcgcttctcccgcagtcgctgttaacatctgagaacgcaatccgatcaaacctcttgaaggaatctcgaattccatgtgctgcatttctccttttgtttccatgatatgaaggtcaccttttctctgagtagccaagtcgattactcttgaagcatattcttcaggaacgtctactaccaaagattcgtaaggttcgcagcttactccgtcgatttctctaaggattacctgtggctgaccgatcgtcatttcgtacccttctcttctcatggtttcaataagaactgataagtgaagaatacctctaccgaaaacaaggaacgtgtttgcatcatcagtctgctgaactcttaacgctaagtttttctctagttctttggttaatctttcttttaagtggttagacgttacatatttaccgtctttcccgaagaaaggtgaattgttgatggagaacgtcatgttcagcgtaggctcgtcaattgccgttctttccaacggttcaggattttcaagatctacgaaagaatctccgatctggaaagcatcgaaacctaccacagcacagatatctcctgcctgaacttcagttacttttttctttcctaaaccttcgaaaacgtatagttcttttacttttccttttgctatttttccgtctgcctgagcaagaccgatccactgagattctttaatttcccctctcgttacttttccgatcgcaattcttcctaagaaagaagaataatccagagaagtaatctgcatctgaagattaccttccgtaactttcggcgcaggaacatactgtaaaataccatccagtaaaggtaaaatatcttcagtctgctctaatgaagtgttgaaccatccctgtttagaagaaccgtagaacgttgggaaatccaattgctcttcagtagcatcaagattgaagaaaagatcaaatacctgatcgtgaacctcatccggacggcagtttggcttatctactttattgattaccaccaaaggtcttaaccctaactccaaagctttctgaagtacgaatcttgtctgtggcatcggtccttcgaacgcatccaccaacaaaattaccccgtctgccattttcagtactctttctacctctcctccgaaatcggcgtgacccggtgtatcaattacgttaattttcgtgtctttataagtaacagaaatattcttggataagatggtgatccctctttctctttcaagatcattgttatccataattaactccccactctcctgattttctctgaaaatattggttgcgtggatgatcttatcaaccaaggtagtcttaccgtggtcaacgtgtgcgataatcgcaatatttctaatgttttgcatataagatttttacgggtgcaaaaatagtgatttttaatgaaatattcaccaataacttttgttaattaacaaattcataatgagactattaaataaatttcagtatttaaaccactatgaacaaagcatttattgaatatttatatccttagaattttgaataattgattaaatttttaaccatcaatcctatgaatatttttcaaaaaggtaaatgaaaacagcctgtaataaaacaatgcatccgaattttaatacaaatgaagtcttcgaaattttatgcctgaagatgatcattgccagaaaagcccccacagttcctccaagagcagaaaccgccaaaagcgtactttcagaaattctccgccggtgcttttcagcttttcttttgtcggctccataaatgataaaggtaaaaagattgatggctgtcaaaaaataaaacataagcaaatctaaaataaaaagtttaaagttagattttttaactttgccagaaaatattcaaaaccaatgacaatacaggatttagtaggaagctattccattcagggaagcaatcaggaggaatctcaggaagtttcttatcatggaatattaactttatttctggacgaaaacaaccgtattgttgcagagtggatgattggagatcatatccaaaccggtacaggattttataaagacggaattctggttattaatttccgctatgaaggtgaagatctgaaaatctacaagggtgtggcagtttaccgctgcatcagcaaagatattctggatggtttctggtctgaaaaatatggtgatccgagatttctgggaagtgaatactgtgtgaggatttttggatcggaggtgttgaattaattccttaataatttaaaaagtccggcaattaccggacctgattattatgccttcttttgattattactcatttgtttccctctgtttccctgattctgatcatattggcggttcgtaccatttgttcctttgttaggatttttcaagttagcactgttttgtgcaggagtgattttctttttcattttttattttttattttaagttagttaaaattacatttactatttcttgaggtgtcactgtattatttatattaacaaccagatcatagtatgattctaaagtataatctacatcatacgcattttcaaactgttttttaaaagttgtgttcctctcattaactgtttcaaaagtttcattatacctattttcttttttcagtctcccgacagcatcttcttcagaaattttaagaaaaacatgaaaagcattcttaataaatttaaatcctaaacgataatcaataattaaatgttcctttttattgcattcataagcgaattccaaatcaatttctttatcaatttccgggttttcagtacatcttcgctgaaattcaacaatactcaatccttcattttctgccctcttccggattaaattccctaaagaaataaactgataccccaattgttctgccagtaattttcctactgtactttttccggaagccacttcaccggataatgtaatttttgttttcatataatttttaagtattaatcccattgatataaaccacctctgtctaaaaagtttttatagctgtaatccatctcgtcataagcttttttagcccctgcttccaatattggtctgctgtattcctgaaagccttttttattggtaaaaaaccttcccgcaggatctatcatcacatagctgtctttcatttcagaattatcttcagaaaccaatatttcatgatctttcaaaaactgatggttcgctataaaatgatcgaactgttgttgactgataataaattcttcaatgtgttcatcattctcccctttcatcggcagaacctgaaataccttccagcgttttggctgagcataaagaatcagatccattaaagactcattgtaattcagatgatggactactgtattgatttttaattgaaagccatacctcttagtttcatctattagcaatttataggcttccgcagttaacggtttttttcctttaaaagctcttcccgatttaatattggtttcatcattcagactatcaatacttagaatgatccagtccagattcttctggtttttcttaaaaaatgcttcattcagattagtcccgttggtcaccagcattgtggtcatcccttgatcttttgctgtggcaataagatctgaaatccatggacatattgtaggctcccctcctgcaaaggttatttttttaaagcccattccggcaatctgctttatcagttccagagattgttctttaggcaaatgtcctttaggaagtatttttttagcctcctgaaatgttgcaaagcagaacctgcatttcatattacagggttcccagagatgataattaacggaaggaattattccttcaaaagatgtttccattgtttgttttaataattgtttattgtacaggagtatcaacaaaaaaacatccggaaaacaaaaaaatgcgtttccggaaaacataaccggaaacgcaggaacaaaagcttttttttgaggaataagagccgttagcccaaaagtttttttatgtcattctgataattttctgacacaggcagataatgacattttgtcttgtttttttcatcaaatacaatgatttctacgtgttcatcttttttatgataacactgaatgtatttcttattgactctgaaagatttatgaatcgttataaactgacttttcatcagtcctttatcttccattttcgaaaaggaaaaatcaataagattctccgttttccggttaatgaaatgaatctgtttgttgttggattcagagccggaagacttatctgcgcttaaatagacgatatcatcaatcagaaccctgtttctttttgttttattaaaatccagataaacgtactgaagactagaaaacaaatatacttcctgtaagaaccttttaaaacttttaacaaatttttcttccgtaaaaggtttggtaatatgatctacacaaatcccggaatcgcgcttcagattctcaatatctttgatgtattctctggtattgacacttgcaaagaataccggaatcccgatttcctgcgccacttccattcccgtcatgctgtcgttacccagatccagatctgccagcaaaatatccggctttaccgttttcagttcctcaaaaaaatgatctgaactgctgctttttaaaataatctgaacatagggaatatgctgaagatacagctccagtttttccagttgtttggggctgtcttctaaaatggcgatgtggtattgaatagacatttttaattataataattatttaaaaatttaatcgctatttcaataatattatatctttttgaagggattagtaaaatactttttttatcaatttctttaaattgcaacccatctaaggaattcataatatcttttgtattatgactaataaaccagccgtcattaattggtgtcatatatgctgaatgttttagctgaatagcactttcattagtatctacttcccaaccattattttttatttttttactggataaaagttttgaatcttgtagaactgcatttaccaaagaatttatatggtatcctcttaaagtatatttatctaaagcatcgattttatagtattcttcatctctaaaagaataaatattagtatctgaaactaacattttaggatagtttatgaatagtcttctccattcttcctctacatctctctttctaagtttctgaagtgctattttaactgttttttgtttaacactctcaatatcggtaaataaatccaatagaattgttggaagtttatcatttgcataaaatattctttcccatttatttttatttcccaaataccataaacctccaaaatagcattttcccacttgaacggaataatcaccataggataataaacatcttataatatcatttgtttctattgttttccataattccacaaaattgtctgctacgttggaaatgtctaaattactctgaaatattaaatcaaaacttgacaaattcccctttaagtttggatgattctctaacaactggatagcttctcgaaactgaggattcagattaatataattaatttttgcaacttctctctgaacaaactcttttctataagttgaatttgatgtattataaacaaattgatcaaatggtttttcactgatgattttatctataaaaccaacaatttcagggtaattagagaaacgaatattaggaacaacgtcatctctagaattatcatttcctttttgattaatatctacaacaaaatttctgacgaatcttgatagttcaataatttcgttagtgactgtgagtctttgatagtcgaattttaaatgaaatttaatgattgaatacagcacaaatctatctaaatgtgtaatagaactaaagctgaataaaagtttagttaataaattagtttcctcttcaaaaatattaaccctatttttatctacttcgttagtaaatatataatcaaaaaataaattgatttcatttacattatcctttgaagccgaaattagattcaaagaatcaattaaaaatttaaggttttcttttgaagaataaactaagtttatgatttcaaaattattaaaatcatactcattatttgaagagatatcttcacctttattgaataaaagccctgtaatgaaattaaaatagtttaaaaatagttgatcaacagcaggcttctcgggcatatactcttttgataatccccaaaataaatcacaccaagttgtgtcaatagaatttacaaattcttttcttaaatcagaatccacgctttcaataatattttcaaatctcgccttgaaattctcaaaaggagtcaatgatttacctcgtgcgttcatcttgatatagagatcatcagaaagattgtattcatccaaatttaaaaattcaaaactgattaatttatcattgacaagtttttcaaaataaccagatgaatctttgaatttttcttcaattgcatccaacattataagagcacctgaaacagtgggatcattttcccattcataaaagtaccatttttggtcttttaataattttgaaatagttatattttcatttaagactaactctccgtttgttacaaggttatcaaaaaagcttcttgaactgtgcctggtttgataagtaaatttagataggttttcttgttggaagattgttttaaatgaatcaaactttttatcctttactgccaaaaaatagtgcaataaaaaaagtgtagttagacgctgctgaccgtctaatggaataaatttagaattttctaaatatccataaacaaaatctaaatcaacaattttatcatcttgtaatgcgttaaacaaaacagttaaaaattcatttcttatactctttttattatttcttccttgtgcataatctctttgtataattggtatttgaacagataaatctttggtagtaaatatatcggtaagcgtaagtttttctccggttttcattttgtgttttttttaattaagataaaatttcaatgtagattttatacagtcttgataatcttctatatcatttttttgccagaacattacttggtcaaacttgttggaataatattttacaaaaacattttttgtgcataaagggataaacatagcatttgcttcattttctaaaatccattttcttttaaccggaaatattgcatttttataggctctattggtataagcatccagtaagcaaagattcccaatactgtcttttacatctccatctatttcattttctttgaaataagacaaaactttattgaataaaacctcaaactttccataattaaaatcttcttgttcaagcaaagatttgatttcgttaattagtgttaaagttgcatcatcattaaattcgtaattgcctgttacctttgtaccaataaaatattcataaacagccattatccaatattttgcgttcttttcttttggcatctctgtattgatagagctgatatgttctaaatcccagttattctttaaatattcatcgaaaggaaaacgaaggttggacttatcgttctttaaaattgactcaacgttgaacaatagaagcagatgtctgatcgtcgtggaatgttgattatagtttaagctatcaatgtcatacttttcgaaatgcttcttgatcttatcttttatataatcttcaaattccgatttttttaaattagtattttcattgattaatttttcaattgaaatgatcttagtggttataacataaccaattaagtgataaagtttatgatgattataccactctttgaaacgtaaaaataaatctattacttccttccagatttctgtaatgttattattttttgtttcaaattcttcattgtattttaggaaggtaaataactcctcatcagaatttgatttcttttttattacatcaaagatatattcgatacgtgtatcgtattgagaattgttatcttttataaaataccaaaaactatcatttcgaagcgtattctcgatgaaatcccattgtgaagcaatctcaatttgctttaacaaaacttcgctagaatctttgctaatgaaattacgctttctcaagaaaagtgcttttattaactcagcatttgtgagcgggattttgcctatatttattcttgtaaatatttcaatagcattcttattatctatttcataccatataactcgtacatttattcctgcttctgatggagatgtgagggtttgaagaatatgatttttataaactccatctttttctgaaaaccacttttcaatggctttacgggctaaacaaatatgataataatcgacattatcatattctttgtcataatctatacttttcaaaaatgattggctgttctttcgagtttcatattcgattgtatatgttccttttccaagtatctctcttaatggttttaagcaatctaatattaaaaaaattgtagttaacctttgctgtccgtcaatcaaaatccattggttattttttttagaaacgactaaaggttgtaaacaatagaaaggctctacaaccgagtttttattattggtataaaattctaaaatatcatttaaaagtgcattgacttctgtttctgtccatcgatatcctctttggtaagatggaacgtaaaacgattcacctaataaatcatttattggttttagttctattttattcatatttattagtttttattgattataatattttttaactttaatttcttcgaatgaagtcaaaaaaatatttaagagcaatcttttcaatgagcaaaaataatctttgtgtcttatttgtaattacggaaaaccgtaaagtaaaaattcagatgttcttttacgaagccaccccatcaataaacacctccacaaaatcctgcaccttctgaataattcttcttccgatattattacgttcagtaagttttggttttatctcaagcagctttagagtgtcacttattttaggagttttggaagtaaaaagaaaatcatcaatagcatctctgaaacggtctttgtttaaagattcttcggttgctattttttcgaaagccgagtttttttctttgttccagtatttttcaaactcttcattcacattgtctccgtcagaaatatgaggaaggttttcttcgatgaacttttcgatcagttcttttttacttcggagttttgcatcgccggaaaggatatcccggatttcttttttctttttttctaacttatcaccttttagatttgagtcggtaagattggctaaaagtgagagaatataacttacattgatttcatcacgatgaatcagttccagctcaaaatccacatcatcgagaatactctccttccctttttcaggtgacttatctctttcaatccacaaatcaagatatttacttttgtatccttcaaactcatattcagttatttccagcttattgaaatcaaaatctgcaaatgatttcaatacattcaaaacgcgcataacttcacggaaagcagtaatgaattcaaacttttcctgttcggtttgataactgttgacactgtctatttcaggagcaaccatctttaaactgttcaaagctgaattgaaaagctcaatataatcttcaatcggcagaatgataatttcctgaatcgcttctttattggaaaacaaagtcaccgcgtcatcggttgcagacttcagattacggaaacagacaatgtttccttgagatttcttttcgcccaataatctgttggtacgtgaaaatgcctgtatcaatccatgatatttcagatttttatccacaaataaagtattcagttccggactgtcaaatcccgtcagaaacatattcactacgatgattaaatcaatttctttactgcggactcttttggcaatgtcgttgtaataattgtaaaaactctggctgtctttggtcgtaaaattggttccaaacatttcattgtaatgaccaatatatctttccaacacatttctgctgtgagaatctccatattgtgcctgtggttctgcaaccattcctaactccggttcctcataaattccggtggcatctttagactcttcattagttccatagctgaaaatagtagcaattttcaagttatgcttgctttcttcttttttcttctgaaaaagatcataatatttctgtaaaacatcaatactgcttacacagaacattgcattaaaagtaccgttatgcgtttttcttccatattctgcgatgagataatctgcaatcttttcaagacgtttcgggctttcaagaagttcctgtgtatctatggcttcaacatctgtgtcaatatacgtattgctaccttctttttccttgtatcttcccacatattccacagaaaacttcagaacattatcatcacgaatggcatctgtaatcacatacttatgcagacagtcttcaaaaagtctattcgttgttgccggagcgccgtctattttcccaattgaattcacttcagaaatcggagttcctgtaaagcctatcatttgggcatttttaaagtattttttgatgttctgatgcgtatctccaaactgacttctgtgacactcatcaaaaatgaaaaccacctttttatctttcagcctgtcaattttattgccgtgcttttctttggtaattgccgtatttaacttctgtaaagtcgttacaataagtttagtattatcggaaagttgtttaaccaaatgtgctgtattttccgtagcatccacacttcctttttcaaaagcatcaaattctttttgagtctgataatccaaatctttcctatccaccacaaaaacaactttttccactttcggaatttctttcaggatctggcttgctttaaaagaagtcagtgtttttcctgagcctgttgtatgccagacaaaaccgttcttatccgtatttcttaccctgtcaacaattttctcaaccgcgtaatattgataaggtcttaaaaccatcagtatcttattcgtttcattcagaacgatatacttggtgatcattttggcaatatgacaaggctctaaaaatgcaggtgcaaattggtcgagctgcgtgatgttattgttgtgttcatccgaccagaagaaagtctgcttaaatgtctgttttgcgttgttggaataatattttgtattgacaccgttactgatgataaacaactgaacataattaaacaatccacttccggaattgaaagactgatgatgataacggttgatttgattaaacgcctctttcatttccagaccgcggcgtttcaattcaatctgtaccaaaggtaatccgttgatgagaatggttacatcataacggtttttaaaattcccttcctgtgccacctgattcgtgacctgaaactgattctggcaccagtgatcctgactgatgaattcaatccattctgaagttccgtcgtcttttataaaatgaaatttatcccgtaacgttttagccttttcaaaaacatttcctttagaaagatgattaaggattttttcaaactccttttctgaaaatgtttttttattgtgaacttcgagctgggtttttaggtttctgatgagatccgcttcgctgcgaatcatcacttttttatgtcctaactgctgtaactgttctactaatttctgctctaaaatatattccggctggcttgacattcgtactgagttttggttaaaaactttgtcaaagtttaaggactttgacaaagttgttttagttttcccaaatgtaagaaataatcggagacaactgcaactattttagcgctttaaacatctggtcaatggcttttttcttctgttccagattgggatgaacgtacaagttcagagttgtactgatattagaatgaccgagcaaaacactcacggttttatagtcgcatttgctttcgatgcatcttgtggcaaaactgtgtctcaaaccgtggaatttaatatccggaatttccagatagcgcatcagatttttgtaatagcttcggtaagttctgggttctgtaggtttagaatcgttggtcagtacataaaaagccggatttacaattttcttaaacggtttcagcattctcagcaaatctctgctgatcgggatttcacggattgaatttttggttttaggggaatcaatcaacagttccgttcttctttctcccccatcaatcacataaattcgctgaatggttttgcggatgttgataattccgttgtccgtgtcaatatcttcccaggtcaaagcgcagatttccccaatccgcattcccgaacaaaggcagatgtaaacccccagatttctaaaggtaaaatgctcctgaatatagttcatcacttttttctgatgcgttctgcttaacacttcaatcgtgtgagtttcgcgaactgtgggatattgcacatcgaaattgatgaaatcgatccatttattcttagctccgaacttcagtaccattttcaaaacaatgagaatatctttgatacttttctgacttaaaccctgttcgagtttttgaaatacaaacttctgtacctcttcatcctcaatctcagaatagtctttgaatacaggcaataaatgattttccagcaacagcacataagccgaaaaggttgattttttcacgtacagctttttgtcattcttccacagttcagcgatttctgccaatgttttctttcttgtcataatttttttggttttaatatttattatttaaaatcctaaagttaatgatgattagaaattatctcctctacaaagaattaagggataattttctccctaatgtaattggggaaaattgaactctggttttcctaatttgcgatttccggggtttgaaggggaatgggaagaaacaactttaggaaattgtgcctactcatttgaatatggaatgaacgcttccgcaatcaaatttgacggagaaaatagatatataagaattacagatattgatgaaagctcttcaaaatataaacctgaatttccagtatcacctaatggacaacttatagataaatacttggtttgtgaaaatgatattttattcgcaagaactggtgcaagtacaggaaaatcttatttatataataaagatgacggaaagctctacttcgctggcttcttaattagagcaaaaataaaagcagaattcaattcatattttgtttttatgcaaacaaaaacaatccaatattataaatgggtacagttaatgtctatgaggtctggacaacctggtattaattcacaagagtatgcaagctactcatttaatattccatcaaaaaatgaacaagataaaattacttccatttttatacttgtggatgaaagaatccaaactcaaaagaaaataattgagaagttaggaaccttaatgaaagatagtcgtgaaaatatattcttgcaaaaaataagattcaaagatgataatttttcaaaatgggaagagaaaaagcttagtgatattttgattgaatcaaatgagaagtcaataaaaaacaaccaatatagagttatatcttctactgcaaagggattattctatcaagatgattattttactcgagatattgcaagtcaagacaacacaggatataaaattttgaaacaacaacaattggtttttagtcctcagaatctatggcttggaaacataaatgttaatatggattttgaaataggtttagtatctccatcgtataagatttttaattttaatacaaatttaacttcccataattattgtaactttttcctaaagacttccttaatgctatttgagtatgcgcaatcttctatacaaggtgcaagtgttgtaagaagaaatttggatttaaatatgttttacaatattaaaatattattaccttcaaaaaaagaacaagccaaaatcgctaattttctttcctccattaaagaaaaaatagaaacagaaaaacagattttagaaaaattagagcttcagaaaaagtttcttttggctaatttgtttgtttgataaaaaaggcttgtcaaggtttgaaaccttcacaagcctttcttgaaatccgaatattttaaacgaaaagattttgtaataaatactttttctgattttcatattgagttaataactcgttttctaagttgattttttcgtcaaacttagacagaaaattagctattctactttgttctttcaaatctggaagatttatttttattcttgaaaagttttcataaaataaataatctctaacacctccttctacatttcttaaaacttcttttctgaaaatatcagtttttagatattgaaacaaaaagtcatcattaactgtatctgttgttttaaaacagacatataaagaactaattataatattctccaaatttccgctgtaaccgattgaaccaacattaattcttgcaggattataagcaaaggtatctttctctattattttgtataacgaaatatcataacctctctcatcactatcaattccttcaaacagttcagactgacttataaatccttttttattgttgattgaataaacaggtagtttaagattttccttattttttttattgacgatataggttagatttcccaatttttggaaattttctttttttgattcggatgagttaaatccttccttaaaaagcttaaaagatatttctttttttgttatttgtaaatcctcaattattttcttttgggtgtggatacgagaattaattaattgaattagttctccaattttttttctttcatcaggatttgaaggatagattattgatgaagatgacactaaattccaatcggctcttggcatttttgaaccactcgatatttctgtaagtgatataaaggagtttgattggacaaatgcatataaataattggaatctaagattgaacttttcaaaacccaaatttcggaagagcaaactccatcgaaatcagctaaatagtatttcttcagataaggtcgcaacttaccaaaaagtacatctccagaattgaaaaaatttttaatgcttttttgatttttggaatcaaatgttgataatagttcacctgaatcttgagataagctttctaattcaatactaggataattggaatcactattttcagggttgtattttttagatttcgaggaaataacctctgagataaatctttcttcccattcatcatcaaattcaggaaacctcaatttgggtacatttccataattaggaaattttccgatacttttattttcttctgtcatctcagttatattattattcgttagtaaaagaattaaggatacttaaaaaacaagacctaattctttcaaataaacttcaatttcagaatccagttgagaacgctttgcttcaagttctttaatttctgccatcaccgcctgaatatcaatttcttcttcttcctcgaaagtatccacataacgagggatatttagattataatcattatcagccacttcctgcaatgtcgctttatgactgaatttttccgttactgtacggttttggtaagtatcaacaattttattgatatgagcattaagcagaacattttggtttttctgtttttcaaattctttgcttgcatctacaaacaggatatcttcatcggcttcacggcatttcttaaagactaaaatacacgtaggaatacttgtaccgtagaaaatattggaaggtaaaccgatcacagcatccagataattcttttctttaatcagatattttctaatcaccaattcggctgcaccacggaacagaacgccgtgaggcattacgacagccataattccgttttcatccagatgatgaatcatatgctggataaacgcaaaatctgcttttgaagacggtgctaattttccgtattgtgaaaatctttcatccaaaagatgcagttcattcgcactccattttgcagagaaaggcggattggcgacaatggcatcaaaggttttatctaaatgttgaggtttttcaagcgtatcttcctgacggatgtcaaaattgctgtaattgactccgtgaagaatcatattcattctcgctaagttgtacgtcgtacggttcatttcctgaccgtagaaatcacttacttttgcttcacgcgcaacccgcaaaagcaacgaaccacttccgcaggtcgggtcgtatacagattttaactgtgcttttctgctggtcacaattctcgccaaaatagaggaaacctgttgcggagtataaaattcccctgccttcttccctgctccactggcaaactgggcaatcagatattcataagcatctcctaaaacatcggcattggtatctgataaattgaaatcaatatcatccaaatgatacagcactttggagattaaagtattcttctcgtcttctgttcttcctaattttgccgaagtcagatccaaatcatcaaacagtccttcaaaatcatcttcactgtttgtccctaatgtggattgctcaatattattaaggatttttgtaagttcagccagaataaaattagatttcccttcctgcttctgatgtccttttttggcaatattactgaaaagttccgaaggtttcaggaaatatcccaaatcttcaaccacttcttcataaatggcttctacaatttctttcccttcttcagtgttttcatccacatcattataatcaatatcttctcccgaatccagcaaaattttattcgctgtaaagtgaattttctctgaaagatatttgtagaaaataaatcctaaaatataatcccggaattcgtccgcatccattttcccccgtaaagtattcgctatattccaaagttgctgctgcaactgacgtttctgttcttctgacatggttatccttaattaaaaacgttaaagatattattttctaaattttaataaaaactttttacaaaataaatttgtatcaggaatcaaaaaagcatggtggcttcggctccgctcagccaccaccacagaaaaatagcacaccgcccaacaacacctggaaaccccatcaaaaaactcggtggctgagcggagccgaagccacattacagaaaaaacaacccaaaacccaacaacacccaaaaaatcaatcaaaaaacccggtggctgagcggagccgaagccaccgtattcaaataaaatactatctttagaaaaaaatacaaatgataaaaggatggatgtatattcttctctgctcagacggcagttattacaccggcagcaccaacgatctggaacgccggcttgcgcagcatcaaaaaggagagggtgctaatcacactaaaaaaaggcttcctgtaaagcttatttattttgaagaatttgaacgtattgatcttgctttctaccgggaaaagcaaattcagggatggagccgcagaaaaaaagaagctttaatcaatggctggaacgaagaacttaaaaaagcggcagaatgcatgaatgaaacccacagtaagttttttataaaagatgaataggtggcttcggctccgctcagccaccactacagaaaacaacccacagcccaacaatacccagaaaccccatcaaaaaatcccggtggctgagcgtagccaaaaccaccattacaaaaaaccaactacaacccaacaatacccaaaaatcaaatcaaaaaatcggtggctgagcgtagccgaagccaccattaaagaaaacaactcacagcccaacaatacccagaaaccccatcaaaaaatcccggtggctgagcgtagccaaaaccaccattacaaaaaaccaacccacagtccaacacccccaaaaaatcaaatcaaagaacacggtggctgagcggagccgaagccaccataaaaaatccccacccttccggatggagattcaaaattaaattaaggtatacgcaccgagatacgcgctgttacacgcaagggtttctttcgtattcctgaaaaatacccagacctgaatttcctttcctgtgtaagaagcaggcatcgtgacatcggcactcaatgctcccctttcggcaacagattcgaaaatttcaaacattcccagttcttcgcaataacacaccgcattcgctttgtcggcggtatctgcgtttccctgtgcggaattgtcttcccagctcagcgcaatgacatttccggtctgcggaatagcgttgatgttctggaaacctgcaagatctcctttcgtaatcagcaccttgttgtataacagttcgggaacatttccattcatttgtaaggcttcgctgatcgtataggaaactgccatatttacccttgattttgaaccgctacccgacccgaaatacttcgtctggatatttttgagcggttgcagaaagctgatcaacatgctgaatttggtctgctgaagaagctgtttatcggtgggctgtttcgagcttggtttgggaatacttcttataatgtcctgtccgcgccagtttgcgcctacaattcttcccacttttcctgaaaatcctccaaggattccttttgttattcgtgccattttgtgtattttttttggttaacagaacgaaggtattacagaattttcccatttcaggcacctgtaaaaaagatgaccggttttgactgcttttgaccggttttgaccggtttgaaaacccatttcttcggatcatgttcgggtcttcttcggatcggcttcggaaaaatgggattttttccgaagaaacaccgaacaacagccgaaggattctgggagaattttatgaaagtttctgcttccttgtacgcttcggctccgctcatcgtacttcagttcaactttatttaaacaaatcattgtaaaccacacccgccatcgtgcgctgagcggagccgaagcgtacatcattgctatatcattttaaacaaatcattgtaaaccacacccgaagccgtgcgctgagcggagccgaagcgcgcatcaacctgaataaccatcccaaaattgtttaaacccacaaagacgcaagatttttaacatgctctatctataaaggcgcaaagattttatctccgataaaatataatacggatatttttcgcttcggctccgctcagcgtacttcattgtcaatccattttaaacaaatcattgtcaaccatacccatcgtcgtgggctgagcgaagtcgaagcacacatcactgcaattccattaaatagattattgtaataaaaaaagatccttcgactgcttctcgctcaggatgacagcacagaaaattgttgattttagagtatgctattgaattgaaagcgttagacaattatttattgtaataaaaagaaatctttagctgtttgatatacttggaaagtaatttaagaacctacattttatatctgcacaatctacgtgaagtaattgcacgacaatcaaaacaacagattattgtgataagaaaaagagatccttcgactgcttcgcgctcaggatgacagcgcagaaagtcattgattttagagtatggtattgaattgaaagtgttagacaattatttattgtaataaaagagatcctgcggtgtttcgcgctcagaataacataagagtgaccgtcgatccgcatcattccgcagaaaccggttttaataccaccaacgaaagacataaaaataccctcatattttgagggcagtattgaaaaacgatttcggatagtatattttctttccgatttttatgtacggaatattctgtgatttccggattctgaataaagtactgtcgctgatattcagcagtctttttacatcggcactgtcataatactgcgaatcggtaatctgctttttcctgagggtatccagaatttcagaaaaaatgtccagaacggtatgcatcagctcttcatcatacaacggtggattgttgggtttctttttcatcctgtgcttttttaaaagaaataatgttattaatttttatttcaaacgttgaggaaatataaaatattgtttcatttttctaatagatagagaagctgaaaaaacgataaaatacaatcattcatttcttcgataaaatttatgaattttttttgttaaaatcttggttatctggaatgagaggaatgaaatcctctgtaaagatgaatgatatttaccagaaaaaaaatatttttttcatgatggttgccaacattccgggtcttcgggttgtaatcatatcagaacttaacagtttttagatccgaaacgatcttcagcatcaaaaatttatttatattcgcagtccttaaaattattgaccatgagaaaaaaaattactctattcttattcggagtgcctttttttggttttgcccagtctgtgatcgggaatatgaactcgggagcggtttctgcggataactttacgcattcggtgggagaaatttatgtgattcctacggagcccgacaaagcgaattccggaacaatgggaatgttttaccagtatgttttacaggttttaggtgtttcagaacttgaaaaagaccatgtgaaaatttatccgaatcctactgctgatttcatttacgttaaactgaattcaaaatcaaaaattgaaggtgcggaaatctatgatctttccggaaagcttgttttcaaaactaaattagattctgaacaactggatctcagaccgcttcaacagggagtttatatgatcgttttcaaaaactctgacatcaaacctatcaaaattatcaaaaaaccttaaaaaaactatttgaacatgaaaaagctttacgcaactataggattatttttagcaagtttagtaagcgcacaggttccgcaggctttcagctatcagacgattgctttcaatgcggcaggagctccgattgctaacggaaacgtttctttgagaatcagcattctggataatgcagccaacggaacggttttatatacagaaactcaaaacaaaacgaccaacgccaaaggtctggtaaatctgaatatcggacagggaacggctacgacaggaaatttcggagcgatcaactggggaaccaacgccaaatttgtaaaagtagaaatggatcctgcaggaggttctaactacacgaatgtcggggtaaatcaattgatgagtgtgccttatgcaatggtggcagataaggtaaatatgaattcagtaaactcctcattgaatgatgatattgttgataataggttttcaaactttgcaatttataactcttccgatagtaaaacttatgtcttcaattctaaaacgaatacatggaacggacaattgggaggaagtgcttccagcggatacattattgcctctaatggaaactttgcgatttataactcttccgatagtaaaacttatgtcttcaattataaaacgaatacatggaacggacaattgggaggaagtgcttccagcggatacattattgcctctaatggaaactttgcgatttataactcttctgatagtaaaacttatgtcttcaattctaaaacgaatacatggagcggacaattgggaggaagtgcttccagcggatatattactgcttccaacggaaactttgcgatttataactcttccgatagtaaaacttatgtcttcaattctaaaacgaatacatggagcggacaattgggaggaagtgcttccagcggatatattactgcttctaatggtgattttgcaatttataactcttctgatagtaaaacttatgtcttcaattctaaaacgaatacatggagcggacaattgggaggaagtgcttccagcggatatattacaagttcgtcatctaattaaaatttaaagaggctcttgcctctttttttatgcaaatgtttaaataaaacaatcataatcactaaatttgtgagtcttaaaaaatcaaataataaattacagtataatgtcagacaaatcaaaaatctattacacgcttacggatgaggctcctatgttggctacacactcgtttttaccgattgtgaaagcttttacaaaatctgcaaacatcgagatcgccgttccggatatttctttggcaggaagaattttagccaacttcccggaatttttgaaggatgatcaaaagatcggtgatgctttggctgaattgggtcagttagcgactcaaccggatgccaacattatcaagttaccgaatatttcagcttctgctcctcaattggatgaagcaattgcagaattgcagtctaaaggttttgcagtgcctaattatcctgctgagcctaaaaatgatgaagagaaagcaattaaagcaaaatatgccaaagttttaggaagtgccgtaaaccctgtattaagagaaggaaattctgacagacgtgctccaaaagccgttaaaaactatgcaaaagcaaaccctcacagaatgggcgactgggcttctgacagcaaaacagacgttgcgcacatgaacggaggagatttctatggaacagaaacctcaacaacggtagaaaatgctacaaaatttaagatcgttttcaaaggaaacgacggttctgaaacgcaattgaaagatttcgccaaccttcaggcaggagaagtaattgattcttctgtaatgaatctcaatgctttaaaagctttcgtacaggaagcgattgaagaggctaaaaacagaaacgtgcttctttcggcacaccttaaagcaaccatgatgaagatctctgatccgattattttcggagcgattgtagaaacgttcttcaaagaggttttcacgaaatatgcagaaaccttcaaatctttagatgttaatcctaataacggtcttgctgatcttttcgaaaaaataaaaggaaatgctcaggaagcggatattaaagcagatattgaagcggctctggcaaacggaccgagagtggctatggtaaattcagacaaagggattaccaatttccacgttccttccgatatcatcgttgatgcttctatggctgctctggtaagaggcggcggaaaaatgtggaacaaagacggaaaagaagaagatacggtttgtattattccggaccgttcttacgcaggtttctatcagtctgttattgatgatatgaaagcacatgggaaattagatcctactacaatgggttctgttccgaatgttggtttgatggctcaaaaagctgaagaatacggatctcacgacaaaacattccaagcttctgcagaaggaaccattgaagttcaggacgaaaacggaaacgttcttctttctcagaaagtagaaaaaggagatattttcagaatgtgccagacgaaagatgctccgattcaggactgggtgaaattagcagtaaacagatccagattatctgatactccggctattttctggttagataaaggaagagcacacgacagagaaatcatcaaaaaagttgaaaaatacttagccgatcacgacaccaacggattagacatcagaatcatggatgtaaaagacgccatgacggaaacattaaaaagagcaagagaaggaaaagataccatttctgtatccggaaacgtattgagagattatttaactgaccttttccctattcttgaacttggaacttctgctaaaatgctttctattgttccattaatgaacggaggtggtctttttgaaaccggtgcgggaggttctgctcctaaacacgttgagcagttcatcgaagaaggttatttaagatgggattctttaggtgaatttcttgctttacaggcttctttagagcatttggcgcaaactcagaggaatacaaaatctcaggtgttagcggatgcactggatgaagctaatgctaaattcttatctaccgacaagtctcctgcaagaaaagtaggtcaaatcgataacagaggttcccacttctatctggcaatgtactgggctgaagctttagcaaaccagactgctgatgcagaattagcggcacaatttgctccgattgcagaggcgatgaaggaaaacgaagaagtgatcaacgcagaattaattggtgcgcagggaaaacctcaggatattgacggttactataaaacagatacgtacaaaacgtatgctgccatgagaccaagtacggttttaaatgaaatcatcgacggaatttaatttcgtttttactaaaatattttttagccatagccgattatatttcggttgtggctatttttatttatgtaagtaaactaccttgactctgctaagtctactccacctttttcgtcgaatccgcctacgcttttcctgcagcggatttcaaaaattattatctttgagacaagatgagtttatatgaattgctttgactcagccatagcttaatcaaacgcttttcgtcgaatccgcctatgccttttctgcagcggatttcaaaannnnnnnnnnnnnnnnnnnnnnnnnnnnnnnnnnnnnnnnnnnnnnnnnnnnnnnnnnnnnnnnnnnnnnnnnnnnnnnnnnnnnnnnnnnnnnnnnnnnctatcaatagattttcgtcaaaaagcatatctttgtttttcatgaggtgttttagtatttgttcaattctaaaatattaattttagacattaagcacctcatgtttttctccgaattcacgttattttaacgatattacactcccgtctgatgcggttgtaaataatgtttatttaattttttacggcgatgaagtaagtgcgaattctacaacattgaaaattaccggagaaataggcagctcacttccctatcctgcttcaacagcttcctctactggtctgaatttaaaatcccgaaattattcctccaattttgttgaatggattacgaatggatgtcaggttaatcagaaatatcagtcgccggatcttaagaatattttcagtgaaatgttcccgggaacagttaacagtgcaaatatctcttttcgaattaaaggaaatgcacagggggattttacagtaaaatctttttcgggaggtataggttacagaccgaagctcgttatactttatacaaccaataccactaccatttcggcaacaattacatccggtacaaacgatgcggaacaaattcttacaaccggaaatgtaaatcttggagaagccgcgctggaactcggcggaaaatcgggaacatcaccgcagattacaggtttaagatttgaaaacattcagattccgcctgctgcagaaattaccaatgcctacatagaattgtattcctacggcacgagtcccaataacgccgaacttaccttccgtacagaactgggaaattctgcggcttacacaacggctgtaaatcatatttctgcacgaaactacagtttgcggaaagtaaaatggatcactgttccatggggtgttgcgaatgtaaaatacaaaacagcagatcttaaagaaataattgatgaagcaaggcttagcggatggcaatccggacagccaattgcttttaaaattgaaggaaatgaaggaaacgcaaccgtgtggtctagagaagcaagttcaacttaccagcccagattagtcatagaatataaaaacaacggttctggtccggcagtaggcgcgattcctttagaggaaacatttaaaacctatatcattaaaaatgaaaatgatgcagaacaaatacttcctacaggaaatatggatctgggaagcggaattcttgaacttggcggaaaatacggagcaactccgcaaaccacgggtttaaggttcgaaaacatccagattccttcagacgcatatattcaggatgcttatttagaattttacgcttatggcaacaatacaacaaatgcaaaaattaaaatctatacagaaaacacaaactctcagatctatacttcggcattacaggacattacaaaaagagattattcaacaatttttattgactggaatacaggaacctggatttccaataccaaataccgcactccgaacttaagaaatataatagacgagatccgaatgaacggatggagttccggaaattcacttgcatttaaaatagaatcggagtcgggaggagctgcggtgtactccaaaaacggttctctctcttatcagcctcgtcttgtcatagaatatcttaacaacaatgcaggaccaaaaattgaaggaatagagacagatcccgccaacatgacgcagctttacatcaatgaaatatcctccgaaggaacattggttcagagcgaagactggattgaactttacaacgcacacgattatcctgtatatttcgccaaccagaacagcggtgtttatctttcggataaaaacggaaacagaactttatgcgaattaagaaacgtttatattccggcaaaaggatacggaatattcatcgcagacagcgatcccgcaaaaggaagcaatcatctgaatttcgggctcagttctgatggcgaaactctttatctgtccagaaaagtaaatggaaatcttatcgaacaggatgttttaccgttcacctccattcctttcaaccagtctttgggaagaatatcagacggaaacggaacattcgtaaactttataacacccacctacaaagcatctaataatggcggaaaaagacggctggatctcactttcggtaaagagagaggtgtgtattcagacggttttgatctttccgttcctgtacagacaggcacaacggttcgttatactttagacggcaaaactccttctgcaaccgtcggaacagtgtacactgctccgatagcaatcaacaaaacttctgtagtgaaattctatgcttatgatgccaatggaaataattccggagtggttgcacatacgtatattctcaagaacaactatgccaatgaaaatacttcaggcggttataaccaatggatatataaatctaatattacagcggatgaatatgcacaggcaattggcgaagtgcctgttgtttctatttcaatgaattccgaacctacggcaacatggacggaggcttccgtagaatatatagacaataatgtatacaccggaagaaaaaatttcttcagcaattctatgacgaaaagattcggacaggaaagtttagggttttataatccgaacataaaatttaaattcaattctgattccggagttaaaaaagcaaagtatccgtttttcgactcttatcctaatgatgcttttgaggttccggaaaaaacgcagaccattgaattaaaacaagggcaggataacgcttccagaaatgttttcaatttagggtttatgcggtacagtgaaaaagtttctatggaacttcagaaagaaatgggaaaatacgccctgaatacacgcttcatccatcttttcattaatggtaaatatcgtggtttaaaaacaatgcgcaatgatttcaataccaataatcttgaagaaacttttggggatgatgatgataactacacaaaggtgaatctgcaggatggctattttaccaacggaattgtagagacaggagatgggaatcaggcaatatgggataacatcagaaatttagcttctgccaaaaaatttcaggagtttaaaaaatttgtagatgttgatgatcttatcaaattccagattatgtttatgtttaccgataccgaaaacgaagccgttgcaattacccataatgatccgaacatcatgaaagccaagttcatgattaacgatacagacggctctttcttcggaggaattacttactcttcggcagatacagccatgcctgcaagatcatttgccggaggcggcggcaattataaatataaatggattcttaatgaaagcaaaaacggtcccggaggaattttcggacagtttatgggatccaacaccaatgctgcaacagggaatttagaatttaagacattagtaaaagatgccgttctgaaatacatcggatctgcctccggaaatttcgcaggagcttcaggagcgccattatccgtacttcgggtacagcagaaaatacagtctgtgatgattgagctggacaggctttataaattagacgcagcatacatgggatacacctcaaatgtttacagccaatggaaaaatgtagacggaccaagaattattgcacaggttccggaaagggtttcgttcagtttacagaaatggatggaatataatatggcgcatactcttaacgctgccgatattcctaccgccggaataattaaaacaacagaaactattaaaatggttaatcccaatgcaaacacccagctttattatacaacaaacggaacagatcctatgggaaatgacggtactatatcttccgcggcattattgtacaatggagaatttaatttaccaacaggaacttatgccgtcgtaacccgtccgttcaccaccaataactggggaccaaaattctcaaaaacgataaaaattgaagaattgaatgaaggcaaattcatgattacaggaatcaattacaaaccgcaatctaacagtgatgcagaatttattttaatttcaaatcccggaggctcagaaatcgatgtttccggatatactatttccgatgcagttagttatacatttccacaaggtttcaaaatagcacaaaaccaaaccattatgcttgcaaaaaatccggctctcatttctgggtttgacttaataaataaatatcaatggacaagtggaagccttagtaattcaggagaaccgattacctttaaagatgcatccggaaatattatggattatgtgtattacggagtaaattctccctggccaactcaggcaaacggtttaggttcttatcttaaactgatctctgaagatatggacaacagtctgccggaaagctggaaggacgattctcttctaaatcctgcctccagattatacgctcagaaagaaaattcacaaaagaaatctccccatgacatttctgctgaaaatttaaaggagattaaagtatatcctaatccgatgaaagaaaaactattggtaatcttaaacgaaaaatctaccgtttctgtttacaatatagctggtcaaaccatcaaaacgcaggttttagaagcaggaacaaataccattaatgtttccgggctttcttctggcggatatataattagaattcagggagaaaaagaaaacaaaacttttaaaatgattaaagaatagaatttttgaaaataacaaaaaaacagccttcagattttaccgaaggctgttttctttgcttaaaatattacattattttttgataaactgatagattttatcatcaattttcaacaaataggttcctgtagataaattttgaacagaaatgtcttttttgttcttaaatggattttgttcagtgtaaatcactttccctgaaagatctaaaatctgtgctgtttttatattttctgttttcccacttacgaaaacatgatcgttcacaggattcgggtaaattttaaattcattattctgagcaagaatcgcttctgcggttgctaaggttcctaaactctgacagtaattgctcgcataagaatcccattccgaaatagtaaacgtcgtggtcggctgagaaatattggattttctgtataaagaaacattccccaaaaccgaagaattatttgtccccgaaactccaatcgcatcaacggttgaagatttatacctcagttcgagatactgacttccggaatacgtcatctgcggagcggccgttacaaactttgcctgattgatcgtgtagcaggagaaattggcatccggattcaataccacaaaagtttcgttattctgaacagttccttccagttcataaggatctacaaaataataatttgttccgctgctaaactgaatagacaatctgtaatcacttaaatttacagggtgtcctgttttattggtgatttcgattcctttgttgtttgacgttccttcaagatattttgttaccattaagtctttagcatagatatctgaagctaatgttgttgcagaagccgtattgctgtctgaagaaagcagataaccgttgtcataggcttttacagtaaaattataagctgtagaaggagtaagatgatctgctgtaaatgttgttcccttagtagatcccaccaaagttccgttctggtagattttatacccgataacatctgtacttgcactcggagtccagctcagtgtcgtaaaataagcactgttttgtgttaccgtaacgtttgtaggagtctgtggtgccaccgcatcgggagtctgtccccagatcgtatttacccacgaaggattatcaataaaaggatttctgtttttctggattgcgtaaacagcattattcctgtcgatttccctttgcgaaacaggatcttgctgatgccactgaagcagcatggcgatataagcaggatcaaaagccctttcttccgttccgtctaaaggattggtatccgaagccggattggcgttattattaaaattaaacgttcctaatttgccttcataccgaactgcaaagtacagcagacttctcgcaacatctcctttaaattcattaatcggctcatacacccttccggtataagtaacccccggaatagcacagttccctattcttgaactgttggtaaaggtataatagatcgtagaacccacaattccgtaaggataattgcttctcaactgattgattcttgcatccgtaggaaccacataaaacagatcggaatacatcggataattgctgtaaaaagtactttgcggcatcatatgttcacgattccagccctgtccttccgcagaagcacttccgataatatttgccgtagtatattcataagcatccggtccggtaggaatttcagaatacatatcaagcagaatcgtcgtattgcttggtccgtaatcgtaatatttatctaaatctgtctgattataataattggttagatcaccataatgccagtttatatttttcgccgaaatgatatcatgaagctttgattttaaggcgtaacccgtcaaacctgtggttccgtcgtaatatcctgcaggagcctgagccgcgaaatacgatgaaatcagaataataggcagtagaaattttttcatgctttaaaaattgggtggctaaaatagtaaattaatctgcttaaagttcggaaaattttattaaaatatcattaattttaagaatataaaaaattgaaaattagatttttgcagttaccgccttatgtcataaataatttttttgggcgttacggcaatttaattatctttgggaactaactattatctatataaatacagatatctatatgaatacagagattattgacaacatcaaaatgatagcggaaacggcaagagaatttgctgaaaagaatatcagacctaatattatggagtgggacgaaagccagactttccctaaagatttatttcatgagttaggagaaatggggttcatggggatcgttattccggaacagtacggaggttcaggtcttggttatcatgaatatgtaacaattctggacgaaatttctcaggtagacccatccatcggtctttctgtggcagcacacaattcactttgtaccaaccacatttatgaattcggaaacgaagaacagagaaacaaatggcttcctcagttggcttccggtaaagtaatcggagcttggggacttacagagcacaatacaggttcagattcaggaggaatgtctaccactgcggtaaaagatggtgacgaatggatcattaacggggcaaaaaacttcattacccacgctatttcaggagatattgctgttgtaatgacgagaacaggagaaaaaggagctaaaaataattctaccgctttcgttttagaaaaaggaatgcccggtttttcttccggtaaaaaagaaaacaaactgggaatgagagcttctgaaaccgctgaattaatctttgataacgttcgtgtaccggattctcacagattaggtgaagtaggtgaaggcttcaaacaggcaatgaaaatactggacggaggaagaatttctatcgccgctttaagtttaggaacagcaagaggagcttacaaagctgctttaaaatacgctaaagaaagacagcagttcggaaaatccatttcagaatttcaggcagttaacttcatgttggcagacatggcaacagaaatagacgcagcagaactgttgatccagagagcatcaactctgaaaaatgctaaacagaaaatgacaaaagaaggtgcaatggcaaaattgtatgcttccgaagcctgcgtaagaatttcaaacaacgcagtacaaattttcggaggttacggttatacaaaagatttcccggtagaaaaattctacagagattctaaactttgcaccatcggagaaggaacttccgagatccagagattggttatcggcagagatattacaaaataaattttaactaaattatttcaaaaacatccacaaatgattaaacaggcattattaggtgaatttttgcatgaagcagaaaatacccgcaaacttttacaggcaattccggacagtgctttggattataaaccgtctgaaattaactggacaacagccgaactggcttcgcacgtagccgaagtttataattggtatgacgcgacattcaatcaggatgtattcgatatgggaacctatcaatacgacaaaggcgatatttccaaagcggaaaatattgttgccaaatttgaagaaaatgttgctaaagcccagaaagctatcgaaagttgggatgaaaacaccatgacaaacgaatggacaatggaaatggacggaaattccatcttccctccaatgccgaagattcaggttatccgctcgtttctgtataatcatttgtaccatcaccgcggagaacttgtggtttatttaagatctacaggaaacaaagttccgggactgtacggaccgaccgcagatgacaagttttaaaaattagaattaaaccattaataattcagtagcatccgtattttgcgggtgctattttctttttttgagaaattcactatctgatgatatttaatgtattgcataattgtttgtgtatattatcaaaaattttcttaaaaaattttgtttttcgtaacgtatttttcattagctttgatattccacaatcaaatagaaaacttgtatgagaaaacagctattggtgattggaatgcttgcatcaggtatttcattcgctcagaccgaccgactttggtctgaaacgtcaagaaaatcaactactgaaatttttgaaaacaaattaactattaacaatccgaaaatctacagtctggatattaatggtttaaaaaatgctcttgcaaaagctcccaaaagactagctgcaggagaaaagtctgaaattattatctctttcccgaattctgagggaaaaatggaaaattttaaagtaagagaaaattctaatttcgatcctcaactggcagcaaaatatccggacatcaaatcgtatatcggtgaaggattaggagactccggttccactgtttattttagcgtttcacctctggggttatcatccatggaaatctatggagataaatcagcggttttcatcgagccttattcaaaagatctttcgacctatgttgtttataaaaaatctgataaaaaagacgatttaagcaagtttgaatgtaccgtaatcgacgttgcgcaaaaaggcgttgcaaatacaaccaatttggtggcaagaccaaatgccgatgatgcaaaactgagaacattcaggttagcactttcctgtaccggggaatacgcaacgtatttcggaggaacaaaagccaatgctttagcggcaatgaacaacacaatgacccgcgtaaacggtgtttttgaaaaagattttgcagcgagaatggttttaatcgcaaataacgattcagtaatctataccaatgcttctacagacccttattctcctgcttccagcttaagcaactggaactcacagcttcagtctacattaacttcggttattggtgaagcaaattatgacgtcggtcacttattcggagcttccggaggtggcggaaatgcaggatgcatcggctgcgtttgtaccaatggctccaaaggaagcggttatacttctccggcagatgcaattccttcaggagataacttcgatatcgactatgtagcacacgaattagggcatcagttcggcggaaaccacaccttctctatgaataacgaaggaacaggagccaatatggagccgggttcaggatcaaccatcatgggatatgcgggaattacttctcaggatattcagccgcattcggatgctttcttccatgcaatcagcattcagcagattactaataatatcaaagcaaaaacctgccctacaagcacaagtacaggaaattcaattcctacggcaaatgcaggtttagattataccattccgaaaggaacaccgtttatgttaacaggatcaggaacagatgcaaacggagattctttaacgtacatctgggaacaaatggacaatgcatcctcttcacaaaccggagcaagttctgcggcaagtgctacaaaagcaacaggaccaacgttcagatcatggacgccacaaactaccccggtaagatacttcccaagaatggcttcagttttggcaggagctaccacaacagcaggatctgagattactgttgaagcactatccaatgtagcaagaacgtacaatttcagatttacagttcgcgacaacagagccggaggttctggaaataactcggatgatgcagtgatcacggtaaacggaacagcaggacctttcagtgtaagctctcaaaataccgcaacaacagttacaggaggaacttcccaaaccgtaacatggaatgtggcaggaacaacagcaaatggtgtaaatgcagccaacgtagatattctttggtctacagacggaggaaatacatggactactctactggcgggaactccaaacgacggaacacaggcggtaacgatcccgaatacgtctaccacaacaggaagaatcatggtaaaaggttccaaccacattttctttgatgtgaataatgccaacattacggtaaatgcaggttccggaacttccgatacgaccgctcctactgctccaactcttgcagcttccggaacaacttctacaagtaccaatctttcatggtctggagcaacagataacgtaggggttacaggctatgatgtttatcagggtgcttcattaataggctctaccgcttctacttcttatacggtatccaatttatctccttctactacatacagcttcactgttagagctaaagatgcggcaggaaatacctcagtttctagcaatacggtttctgtaaccacgttagcaggaactacagtttcttactgttctgcttcagctaacaatactgctgatgaaagaataggaaacgtaacgttcggaagcattaacaatacttcaacaggaacggcaggttacgaaaacttcacttcagtttctacgaatgtaacaagaggttctgcgtactcactttccattactccggtttggacatcaaccaaatataatgaagcttatgctgtttatattgattataatagagacggagatttcgcagacagcggagaattggcttggtctaaaacaggatctacaacaagtccggtaacaggatctatcacgattccttcaacagcgactgtaggaactacaagaatgagagtaatgatgcagtacagctctgtacctacatcttcttgtggaacgtatacgtacggtcaggtagaagattatactttaaatattgtatcatcaggaagaggaaatattttagatacaaaagatatgattacagatatccgagtgtatccgaatcctgcaaaagatattttaaatatttcaaatacaacgaacgaagactataaaatcttcgatatgggtggaaaactaatcaattcaggaaaacttgaaagaggcgcagtaaatgtaagcggtcttattaaaggtgcttacatgatccagattggagaagtctctaagagattcatcaaaaactaattacttcactcaattaagctttgaggtaaaaggctgtccggaaacggacagtcttttttttgttgctgagtaggtaaaattaacacactctacactctgcataaattccaaacgggattgagctcttaaaaatcatttaaacaaatcccaaaatattttcaccaccattcacaatcattgaaaatctgaaagatttatgaaagaaaaagcatgatctatttcttgacttttgagattcttcacttcacttttaattgatgttcttagattttcagtctatgttcagaatgatatcattgcataaaaaacctaagcaccgattcttaaaatctaaaacccaattgttatctttgcctaaataaaaaatatacatggataaaattgatagtctgaaccaggtagcagaattccacaccacctttaaagcccctattttagatacccctcaaattccttcaccggaaagatgcaacctgagagttgaacttcttcaggaagagctgaacgaactgaaacaggcaattgcagacaataatatcgtagaaattgcagatgctttatgcgatttgcagtatgttttaagcggagcagttctggaattcggacttggcaacaaatttgtagagttgttcaacgaagttcagcgttccaatatgtcgaaagcctgcgataatgaagaacaagcacaggaaacggtagaattttacagagcaaaagacgtagaatcattttatgaaaaatccggcgagaaatttaatgtatacagacaggcagatcataaagtcctgaaaaacaaatactactctcctgccgatttaaagacaattattgaaaaatagtatgaaaaaatttattacgaattgtatggctgtttcagttctattcatggcaactcaacagcttactgcacagaaagtggttgtaggacgtgaggttgaaaccactgccgacggaaaaatgcttttgggaaatcagcttaaaagtaaatttcttgaagctccgtattccgactggtatgtgaaagagcatgatgaatatgctttggatcagaaagccatcggtgaacttaaaaaaggaaagatcaacacgtataacattaccgttttcatgggaacatggtgcgaagattctcacagagattttccgagactcatgaaaatccttgaagaggtaaaatatccggaaggcaaacttaccattattgccgtaaaccgtaaaaaggaatctcctaacggcgaagaaagccttttcaatatccagaaagttccgacgattattgttgagaaatacggaaaagaattgggaagaattatcgaaatgcctacatcaggatatattgagagagatttggtagagattctgaaaaaagatgacagttctgtaattaaagaaatttttggtaaataaggtttgagaaatagtaaagttttaatatcgtttttggcgggagctgcactggtaacagttttgtttttcagtttaaagtcatgctttaatctcagtgaaaaaaccgagaaatcagattattacattctgaccaatcagatttcgaagatgaataaaatggtcgtgcttgagcagaacacttcttccattcagaaaaccaaaatgggctacgaatttttaggcaaagaagtttccagcaacagcatcattacctacaccaaaacgaacgcacaggtttcttatgatcttaacaagatgaaaatggaggtagattcgatcaataaaaaattagtgattaccgaactgcccgatgcagacatcagaattacgccaagtgtagaaatccagtcgatggacgattcctttttcaacagaatttccgaaaaagacattaaaaacgtaacgcagaaagcgaaagataccgctgtaaaatccatcgatcagaacaaactgagaacagaaggaagacaacagctgatggaaaatcttaataatatttttgttttggcaaaggctttgaattataccattgaggaccagaccggaaagctgggcattttaggactataaaatttaaagctatgcattcagaagaaaaagaaaaacaggaatctgcaaattctgcagaaaccaaaaagcaaaatcaggattttcccgatattccagcttcatcagaaaaaacaaatccgtcggacgtggataaagaagacgttcagaaatcttctcaaaacaacaaatccgggaaaacggataatacggacgaaaaataaaaaggttctgctcaatgagcggaaccttttttagaaaaaaacacaaataaaagtcaaatatgtaatatgaactacaacggtcaatctgctccgcttgtcaactaccgtaactatttggctgttgacttacggaagcaaaactgacatatttttaaacaatagttgattttccgagctttacattttcaaaattgtaatacgatttctcggaatatttaatataatctgcgataaaacttcccacttcactggtggaataaggctgttcagaattcagatccaccgtaacgtatttattctcaatagcatactctacagattgtctcagtttttctgctgcctgttcaagctttaaataatccagcatcattgccgtacttaaaatagaagcaacaggattcgcaattccttttccttttgcctgcggataagaaccgtgaataggttcaaacaaagcattttcatttccaatggaagccgaagnnnnnnnnnnnnnnnnnnnnnnnnnnnnnnnnnnnnnnnnnnnnnnnnnnnnnnnnnnnnnnnnnnnnnnnnnnnnnnnnnnnnnnnnnnnnnnnnnnnnaaacataaaatcaagtgctacatcaggatactctgaagcaatttctttacagacctttctccataatcttgaagtatccaaaacgttcgctttatcaattaaagttaacttttttctctttttctgagcctcctgaaaagccatatgaacaataggtgcgatttcatcacggttgtatttgcagatatcatacgcataacctgcttcctcatccgtaaatttttcgccaaaataaattccgctcaccagttccctgaaaatctgaatatctgttccttcaataatttcccttttcaaaggacttttctcaattaaagaagcatacgttttcaaaggtcggatattcgcaaaaagccccaattctttacgaagtttcaacaacccctgttccggacgtactttagcatccggattattatcgaaagaaggatctccgatcgccccgaaaagcaccgcatcagacgctttgcagatttccagtgtttcatccggcaaaggatttcctgtcttataaatcgcttccgctcccatcaatccgtatttaaaatcaaactgatactggaatgcttccgcaatggaatctaaaattttaatactttctgcaaccacttccggcccgattccgtctcccggaagcactgcaattttaaaattagttttcatacactttttgtgtttttagttcgaattgttcgatcgcctgttttctgctgattaaaaaatcaatatcatcatacccattcagcagacatatttttttgtaagaatctatttcaaaactttccgtcttatcattgaaggtaatggtttgtttttcaacatccaccaaaatttctttttcaggattttcagtaatctcagttaaaatttcttttaaaaattcctcagaaacttttacaggcaataatccgttatttaaagcattgcccttaaaaatatcagcaaaaaaacttgaaacaaccaccttaaagccataatccgttaaagaccatgcagcgtgttcgcgactgcttccgcaaccgaaattatttccggcaaccaaaatttcaccgctgtattttgcgttattcaggacaaaatcaggattcggttcattcgtatgaacatcgtatctccagtccctgaaaagattttcgccaaaaccttttttatcaatactctttaaaaatctcgccggaataatctgatccgtatctatattttctacaggcaaaggaattgctctggattgtataatgactaatttttgcattttttcgagccaaaatagttttaattattatttttttctttttcaggagctatttcccgctatccactcatactcctcactccattgcttttaccttcgcttgctctggggtaaccgtttctatcggggctaaaaaagtgaatggttaatttcacttcgtgagtcaatagtcaatttctaaaattcactattcactattcactattcacttttaaacttatgtgctctttttccatttaagtagtaagcttaaaaaactaaagtgtttaaatcttttgcgtcttttgtggtaaaaaagtttagacaagttttaagtaaattcatctccatcagttttcaaagatggaaattcttccttccacagcaacttttgcagccgtcaaaggacttgccagaattgttctcgcaccttgtccctgtcttccctcaaaattcctgttcgaagtggaaacgcaatattccccttccggaattttatcgtcattcatcgctaaacacgccgaacatcccggttgtctgatctggaaacccgcttcattaaaaaccgtatctaaaccttcttcaaagatctgtttggcaacctgttgagaacccggaacaagccacgcatgaacatgatccgacttcctttttcctttaacataatttgccgcagaacggaaatcttcaattctcgcattcgtacagcttccgataaaaacataattcactttaatatcagaaagagcctgtcccgctttcaaacccatgtattttaaagccttctcttcagattcgttctgaggattcgggatattctgactgatggaaattcccattcccggattggttccataagttaccatcggataaatttccgaagcatcgaaagaaaattccgcatcaaaaaccgctccttcatcggttttcaaagttttccagtactccagtttttcttcccattcctcgcctttcggtgcgaaagttcttccttttacgtactcaaaagtcgtttcatcgggagcaatcattcctccgcgggcgcccatttcgatgctcatattacaaaccgtcattctgccttccatcgacatttcttcgaagacatttccggcatattcgcagaaatagcctgttccgccgtcagttcccacttttgaaataatgtacaaaatcacatctttgggctgaacatttttatttaacttaccatttatggtaattctcatcgattttggcttattcagcaacagacactggctcgcaaaaacctgcgccacctgacttgttcctattccgaaagcaatcgagccgaaagcgccgtgtgtagaagtatggctgtctccgcaaacaatgctcattcccggctgtgtaacgcctaattccggagcaatgatgtgaacaattccctgatactgatgtcccaaaccatacaattctatgttgtttttcctacagttttccgttaactgctccacctgatttctggatgatgcatcgcgaatcggctgatcctgatccagagtcggaacattatgatccgcagttgccacaatctgtttcggtctgaaaacttccagatttctagcttccagttccgcaaaagcctgtggactggttacttcatggatgagatgtttatcaatataaataatctgaggtccgtccggaatcgtctctacaacgtgcgcatcccagactttatcaaacaatgtcttttttgtattcattctaatttatgtaatggagaatcaattcttttaccctatttttcttgtcactttttcaatcattgaacttaaatcgtcattattcacttcttttttaccgtcagcaattttcaaaaactcctgatacagaaaatcaagttcatttttagtaacttcaaaaccaatatgtttaaatctgtatgccaaagcagaacgtccgcttcttgctgttaaaacaatcgtagaagcattcactcccacttccgcaggatcaataatttcgtaagtttctctgtttttaatgactccgtcctgatgaattccggaactgtgcgcaaaagcattcgctcccacaatcgctttgttcggctgaactggcattcccatcaattcagaaaccaaaacactcatgggattgagcattttggactgaacgtcagtatataattctaaatatggatgctgttttaaaatcatcaccacttcttccagcgccgtatttccggctctttctcccaatccgttaatggtgcactctatctgtctcgctccgttgatgactcctgcaatagaattggcggttgccattcccagatcgttgtggcagtgacaggataagatcacacgatcaatgccttttacattttctttcaggtattttatttttgcaccgtactcttcaggaagacaatatcccgttgtgtccggaatattaagcacggttgcccctgcttttatcacttcttcgcaaactcttgccagataatcgttgtctgttcttcctgcatcttccgcataaaattctacatcttccacatacgatttggcatattttaccgcctgaaccgctctttcaacaatatcttccctgtttgaattgaatttaaatctgatatgagaatccgaagttccgattccggtatgaattctcggtcttttggcgtattttaatgtttcggctgcggtatcaatgtctttctggttggctctcgtcaatccgcagactttcgcattttttactaattttgaaatctccgaaaccgaatgaaaatctccgggactggaaatcgggaaaccggcttcaatgacatccactcccagttcatccagtttttcggctataattaatttttgctcggtatttaacttacagccgggaacctgctctccatcacgcagcgttgtatcaaaaatttcgactttttcggatttcataatgaagtttttacttaattttgattcaaaactagaaagatgaaacgtttattcattttcagtttttataaaaaatacaatactcaaaatattgtattttaatttcaattatttgattatcattattttaaattttaaaaatttacaatggcagaattgcataaagattttttattcgtactcatcaaatctctgacaacttcagaaaaaaggcaattcaccttgtatgtaaaccgtctcggaattaacgcggatgccaaatttcttcttcttttttcagaactggataagatgaaggaatacgatgagcatatcatcatcaacaaaaaaatttcgactaaacagcagttatcgaacctgaaagcgcatctttacaagcagattctggtgagtttacgaatgaacccgagtcatcagaattacagaattcaactgcgcgaacagcttgattttgcgaatattctgtatcagaaaggtttgtataaacaggctttaaaaattttagataaagcaaaacagaccgctttagaattggatgaaaaaagtattgcttcggaaattatcgatctggaaaaagtaattgaatcccagttcattacccgaagtattgaaggtcgtgccgatgaactgatcagacaatccacggaaatcagcaaacagaatcattatgcgacagaattatccaatctttcgctgaaactgtacagtgaaatgctgacaaaaggttatgtaaaaaacgatgaagaccgtgccgaaatcatgcagatattcaatgcgcagattcagaaaattaactttaaaaagctgaatttcacggaaaaattgtggtattttaaagcgcacgtctggaaaaaccaattgcttcaggaatataaatatacgttgaaatatgcttttcaatgggtggatttatttcacaaaaatcctgaaatgatcgtgagtcatcccgtttggtacattaaaggaaatacctacctgctgaaaatcttattcctttacggaaatattcacattcttgaggaaagtttcaaggatttcaatgaggttgtttattcttcaagttttgctcaaaatgaaaacctgcaatcgcttatttttctgacgcattacaatactttaatgaacattcactttgtgaaaggtgaattcttttccggctcgaaattgattcctgaaatcgagctgaaaatggaaaagctccgtgataaaattgatgagcaccatttcatgattctttatttaaaaatggcagcgatgttttttggaagcaaaaaatttgaggaatccatccattattcattaaaagtgatcgaatccaaaggaaatattcaggaagatttactgttccacacccgaattttgattctgatggcgaaacacgaatcaggaaacgatgaagattatgatgaatttataaaagcaactttaaaattcaccaaaaagatgaaaaaaccggatgaattccattttgaaagcattcattttttcaaaaatctgaataatataacaccgaataaacaattggaatctttcaaaaaatttgatgaaaaattaactcttttttctgaaaatgaatactacagaaggtctttgctgtacattgatattcacggttgggtacagtctaaagtgagaaatgtggatgttattgagattattaaagaaaaagtacggtacaaaagaaagcatcagtcttaatttaacctattcataattagatcgttggttaaacgttaattatttataacggtattctgagatttttcgtattaaatctcgtctcaaaaatgcgtgaaagtagtattttaaataaaaaatccgtatttttgcatcttaaaatttcttagtaaacaatgataaaaattacacttccagacaatagtgtcagagaattcgaggcgggagttactccgctagatgtggcaaaatctataagcgagggattggctagaaataccatttccgcagttgtaaacgacaaacaagtagagacgaccacacctataaccacggatgctacggtacaattgctaacctggaatgatgatcttggaaagaaagctttctggcattcttctgcccaccttttggcgcaggcaatccttgagttttatcctagtgctaagttaaccatcggtcctgccatcgaaaaaggattttattatgatgtagatttcggggacgaaagcttatctgataaagatttcgaaaagatcgaaaagaaggttttagaaaatgctaaaaaaggatctacattctctttatatccggtttctaaagaagaggctttaaaagtgtatgcagacaatccttataaagtggaactgatttctaatcttaatgatggagaaatcactttcgtaacgcatgataactttacagatctttgtcgtggaggacacattccgaacacaagtattgtaaaggcaatgaagattttaaatgctgccggagcatactggagaggaaatgaaaaaaatcctcagttaacaagagtttatggtatttctttcccaaaacagaaagatttgacagaatatcttgaacttttagaagaggctaaaaaaagagaccacagaaaactgggtaaagaacttggaattttcgctttctctgaaaaagttggtcaagggttacctttatggttaccaaaaggagctgccttaagaaaaaaattagagaatttcctttctgaagctcagaaaaaagcaggttacgaatttgtaatttctccgcatattggtgcgaaggaattgtatgtaacttccggtcactgggataaatacggagcagacagcttccagccgattaaaactccgaatgagggagaagaattcatgctgaagccgatgaactgtccgcatcactgtgaaatttacaaaacttcacaatggagctacagagatttgcctaaaagatatgcagaatttggtaccgtttacagatatgagcaaagtggtgagcttcacggtttaacgagagttcgcggatttactcaggatgatgcgcatttgttctgtactccggatcagttgatggatgaatttaagaaaacgattgatttggttctatatgttttcggttcattaggttttgctgattttaccgctcagatttctttaagagatcctgaaaataaggaaaaatacatcggaaccgacgaaaactgggagaaagcagaaaatgcaatcgtaacagcagcaacggaaaaagggctgaatacagtaactgaatacggtgaagccgcattctacggtcctaaactggatttcatggtgaaagatgctttaggcagaaaatggcagcttggaacgattcaggtggattataacctaccggaaagatttgatctttggtataccggaagcgatggcgaaaagcacagaccggtaatgattcacagagcgccgtttggttctatggaaagattcattgcgattcttattgagaacacagcgggagatttcccattgtggctggctcctgatcagtttatcattcttccgatcagtgaaaaatacgtagattatgctaaaaaagtttctcaattactggaaaatcacgatattagcggattaattgacgacagaaacgaaaaaacgggtaaaaagatccgcgatgccgaattaaagaagattccattcatgattgtagtgggagaaaatgaagaaaaggatggcacaatttctgtaagaagacgtagtgaaggcgatttaggagtaatgaagattgaagattttgtttcttattttaaagaacagtcaaaaactggatttgagtttaacgcttaaatctaaaaaatatcattctaaatgattgaaaattatttttgttcagaatgattgataaaaatagaagttaaccaataaaattataatacaatagcacaaagatttaacaacaggggcccacagagacgtccggtacaggaggacgcacacttgatcaacgataaaattcgtgtgagagagcttcgtttggtgggcgataacgtagagccgggagtttatcctactgataaggcaagacagattgcgcaggagcaggaacttgatcttgtagtaatctccgataaggctgaaccgtttattgcaaggattctggactataaaaagttcttatacgagcaaaagaaaaagcagaaggaattaaaagctaagcaggtaaaagtagttgtaaaagaaatccgtttcggacctcagacagatgagcacgattacgaattcaaaaagaaacatgctgagaaattccttgaagaaggttcaaaattaaagacctacgtattttttaaaggacgttcgattatctttaaagaccagggagaaatcttacttttaaaacttgctcaggaattggagcacgttggaaaagtagaccagcttcctaagcttgaaggaaaaagaatgattatgatgatgagtcctaaaaaaccagctaaataatctacagccggatctacggatctgaaactaaaatatacagcctcaaattatttttgaggttttttttatgtattatgattattaaatcccagattaattaaaattcaggattttatattaattattaaatattttttaatttttaacatagatcaagattatccatttaatttacgactacatttgctttagaaaaataagacaataataagcttatttaaaaattaaaattgaataacaaattaaacaacaaagcaatgagtacattaaaattaaaagacggaacagaaattttttataaagatcagggagaaggacctgtattgatgtttcaccacggatggccattatcttctgatgactgggatgcgcaggttattttcttcttgcagagaggttacagagtaattgcccacgacagaagaggtcacggacgttccagccagaatatttataatcatacgattgaacaatatgcttctgatgccgcagaattggtagaatttctggatctgaaagatgttatccatatcggacattctaccggtggcggtgaagtgatccgttatgtaaacaaatatgccaacggaagagcaaaaaaagcagtattgataagcgcagttcctccggtaatggtaaaaagcgaaaacaatccggatggcgttccgatggaggtttttgacaacatcagagatcagactttaaataacagaaatcagttttttatggatttaacggttcctttctacggttacaacagagaaggtgccgtagtgaagcaaggtgtacagaccaactggtggagacagggaatgatgggaggaattgtggctcattatgacggaatcaaagctttttctgagacagattttacagaagacctgaaagctgttgatattccggtactgttgctgcacggtgaagacgaccagattgtgcctattgaaaattccgctataaaatctgctaaattattgaaaaacggtaagctgattacttatccgggattccctcacggaatgcctactactgaacatcagacgattaataaggatcttctggaatttattgaggcttaattttttcgacatacatataagtaaaagcagcaatcagagtattttggttgctgtttttatttcaagcggttttgccggaacttttcagtaatttttgttcaaaaatatttacaaagtttgtcatcctgaaaagggtttcaaaaatacattaaatactttgtttagatgctttcagcatgacaaatagtatggatattcgtttactatttaacctcatttcaggataagaaataaatttaattaattgatttatcgcattatattaatttatcgcaaagaaaaacaagatatttttttaattattgaaagtttgtaagctaaacaaaggcacttcgtttatgtaaaaaagacaaaaatggtattactttgataagttttacgcctttgtatatcttaaaagctgaattcttaataattaaatctccttgtttaacgttgagtttaacaagacttatttattcccgaatccggttatttatattgggaactgccactctagccctgattggaacgacatcctttttggttgcgggcggagctaagcggagtctgcaaccaaaaagatacagtggaaagcaggaaacagcttcaaataaaatttatctcacaaaaacggtaatatataaagcttcatacacttccctattctattcaaaaaaatctttttcaaatctcgaaatttttccgtaattttgcagactattattccgggcaatcggaaatagccaaaacagatattgataacaaaacaataaaaagcaaaacaatgccaaaattaaaaacgaaatcaggtgctaagaaacgttttgctcttaccggatctggtaagatcaaaagaaagaacgcttacaaaagccacatcttaacgaagaaagaaacgaagcagaagagaaatcttactacgacttcttacgttgctgctgtggacgagaaaagcgtattgcgtcaattagcaattaagtagtttttataaatctatagtcggtttataagaattcaaacaaattcaacattttaaccctgaaatggagccactaagagtaatgaaataattaccgcacatttcaaaaaaacaatttaaattatgccaagatcagtaaattcggtagcttcaagagctagaagaaagaaaatttttaagcacgctaaaggttatttcggaagaagaaagaacgtttggacggtagctaaaaacgcggtagaaaaagcaatgcaatatgcttaccgtggtagaaaagagaagaaaagaaatttcagagcactttggatcactcgtatcaatgcgggaaccagagagcacggaatgtcttactctcagtttatgggggctcttaaaaagaacaacattgagcttaacagaaaagttttagcagatttagcaatgaatcaccctgaagctttcaaagcagttgtagatcaagtaaaataatgtaaaatttttgttatcaatataagtcccaggttttttgcttgggatttttttattatttacatttgtgtaatattattaaatttataaaattttcctctaaagtgaaaaaaataactactctactgctgttttcattaggaacatatgcatttcaggctcaaagttttattcaggcttatcagaacagagcgaatttggttacccagaccaatataacaacgttacttcaggaatttgggaatcttggcataaaaacaacgggttctactgccaataccaatactttgaactggcttaaagcaaaatatcagtcttacggttatacagcaagtcagatcgtagaagatcctttcacatttggctctacaagttctaaaaatttaattattaccaaaacaggaaccgtttatccgaatacgtacgttattatttgcggacattacgacaccattatcggtcccggagtaagcgataacggaagcggaacttctattattctggaagcggcaagaattttaaaagatgttccgacagaatattctattaaattcatccacttttccggtgaagaacagggattacagggaagtgcacattatgtaaacagtgtggttttccagaacagtgtccgtcagttaaacatcaaactggtctttaatttagatcaggtgggtggaaaaataggcaattcgaatgttgctatcaactgcgaaagtgaccaaagcgggcaaacaggaaacaatgctgcctctctttccgttacgcagcaacttgcggcgtgtacaacgctgtattcaccattacagacggtaatgtctaacgcctactcttccgattatatgccttttgaagcgaaaggagacattattacaggcttttatgaaacggtaagaagttataatgaacacaccgtaaacgatacttttgcgaatgtagatcctacttatgttttcaacgtaggaaaggcggctgtaggagctttacagcattttgcaacagcctctacaagtttattggcgacggatgaaaagacagttaataatctggaaaccgtaaagatttatcccaatccggcgaaagatcttttaaatattgaacttccgaaagacgttaaaaactttagtcttgagatttcggatatgaacggcagacttgttttaaacaaacaaaatgaagttaaagttaatatttcaggattagcaaacggtgtttatatggcaactgttaaaacaaaagaccaaaaagcggtaagaaaaataattatcggtaaataatttttatttttctataaaattaaaatcctgaacttttgtttaggatttttttattattacatttgtataccaatcaaattacaaaaattaataacaaaatgaaaaagacatctacatttctgcttttttctttatctgctttaagcttcaatgcacaatcttttattcaggcttatcaggacagagctaatatggtaacacagaccaatattacaacaaacttacagaattttgccaatttagggattaaaaccaccggctcaactgcgaataataatactttcaactggcttaaaaataaatatctggctttcggatattcttcaaaccagatttcggaagatgccttcacttacaacggcaaaagttcaaaaaatttaatcatcactaaaacaggaaccgtttatcctaataaatacgttatcatttgcggacatttcgacactataaacggtcccggagtaaacgataacggtagcggaacatccatcattctggaagcggcaagaattttaaaagacgttcctacagaatattcaattaaattcatccatttttcaggtgaagaacaagggcttattggaagttcacattacgtaaataacgttgtttatcaaaataatattaagaaattagacattaaattagtctttaatctggatcaggttggcggaaaaatggggaataataacaatacgatctattgtgatgaagatcagggaggtctgtccagcaataatgcagcttcagcaaacgttacacagcaattgcgaaactgtaccgctttgtattctcctcttttaacggcggtagatccggctgaagctacagattatattccttttgaaagaaaaggcgaaattattacaggcttttttgaaaaaatcagaagtaattatcctcatacttcaaacgatacatttgctaatacagatcctgtttatatctacaatgtagcaaaagcttctttgggagctttacagcactttgcagtagcagcaaattctttacagaaaaaagaagtgttactttccggaaattctatagaatctataaaaatctatcctaatcctgcgaaagattatttaaatgtcgaacttccggaagatgttaaagatttcactcttgaaatttcagatataaacggcaggcttattttaaataaggaaaatgaaacgaaagtaaatgtttcagaattaccaaacggaacgtatatcgcaacagttaaaacaaaagaccaaaaagcggtaagaaaaataattattggaaaataatcaacggtcaagcaaaatcctgagtttctttctcaggattttttatttctatatttgtaaaatagtaaactaattaccaatatgaatttcaaaaaattaacagccatttttcttttttctgtaacagccgttggatttcaggcacaaagttttatccaggcttatcaggacagagttaacttattaaaaaaagaggacatcatatcccatttaaaggaatttgaaaaactgggtgttaaaaccacaggttctgtagaaaatgacaacgccctgaactggatcaaaaacaaatacttgtcttacggatattccgaaaaccagatggaagaagatcctttttctattggaaaattaaaatctaaaaacctgatcattactaagaaaggaactttatatcccgataaatacatcattatttgcggacatttcgacagcattaacggtcccggagtcaacgataacggaagcggaacatccatcattctggaagccgcaaaaatcctgaaagacattcccactgaatattccataaaattcattcatttttcaggagaagaacagggattgtacggaagcagacattacgttaacgatgtcgtttatcagaataaaacaaggcagattgatataaaaatggtcttcaatctggatcaggtcggtggtaaaaaagggatgttcaacgataccgtattttgtgatgaagatcagggaggaagctcaaaaaataatgaagcttctaaacaggttaccaaagaactgatgatctgcacaacactgtattctccattacaggtaaaaatcgatcccgcagaagataccgactacatctcttttgaaaaaaaaggtgaagtaatcaccggatttttcgaatatctcagaagtgatcttcctcatactgtggatgatacttttgccaatactgatgttcagtatgtttttaatattggtaaagcggcaatcggcgcattgcagcatttcgctgtcgcatcgaaaaaatagagataatcgaattgttctaaaaaagccagtcgaaaaatccgactggcttctaatttatccggctcttataccgccttttgcagcatcagaattaggaggttttacttcttttacttttcccttttcagggttaatttttcctttactttccggttcggttttggattgctgattttctttgttgtcttctttcatgggataattttttaatgaattgtatttaaaacacataagtgacaaaaataagctgaaatttcatttaaaacagtttaaaaatcttcgattttattcttctgatagctttgaatattctaattcttgcaacataatggtcttttgcctcttttgtggttgattcttaatgagtttagagataaaaatacaactttatcggtttctggacagcaaaatttcttcaatatcttctaaagtaaaattcttagctttcagtaaaattaaaaggtgatacagcagatctgccgcttcatttttaaataaatcatcattgctgtctttggcttcaataaccacttctacggcttcctctcccactttctgagccactttattaattcctctctgaaataatgaatacgtgtaagaaccttcggttttttcatcaattctttggcttattttttcttccagttcatacagaaaacctttagaatctttatccccgaaacaactgaaacttccggtgtggcaaacaacattcgtaggaattgctttaattaaaatcgtatcctgatcgcagtctatcgaaatatttttaacctttaaaaaatttccggactcctctccttttgtccagagacggttcttggaacggctgaaaaaagttacaattccttcttttttggttttttcaaaagcttcttcattcatgtagcccaacattaaaacctgcaacgttctgtcgtcctgaataatcaccggaaccaaaccttcacttttattaaaatcgatattcatcgtactgcaatttttttaaattttaaattatttttaagatcctgaatctgcacttctccaaaatggaaaatacttgccgccaaagctcctgttgctttagtatgattaaaaacggcttcaaaatcttccatttttccagcacctccggaagcaatgacgggaatatttacactttcggaaattaactttgttattctgagatcaaaaccgttttttgtaccatcgccatccattgaagtaagaagaatttctcccgctcccagttcttccgctttctttgcccagtccaatgtcttcagatccgttatttcccttcctcctttcacatgaatccaatcggatccgtctaccaatcttgtatcaattgcagccacaacacactgacttccaaactcttttgataaatccgaaattagtgccggatttttaaccgccgaagaattgatactgatcttgtctgctccggcttccaagagtcttcttacatcttccacggtagaaattccgccgccgaccgtgaacggaatactcagttccgctgcgattttctgtaccagtccggcaaaagttttccgttcttctatcgttgcggttatatccagaaaaaccaattcgtctgcgccttctttttcatatcttttggcaagttctacaggatctcccgcatttcttaatccttcaaaattaattccttttaccgtagttccgtctttgatatccagacacggaatgattctttttttaagcattttcaataaaattttggagttgctgcaaacttattctgccttcataaattgcctttccgataatcgttccggaacagccgatctttttcatctgttcaacatcttcaatacacgaaattccgccgcttgcaattaactgaactgctgtcttttctacaatttctctgtacaattcatccgatgcaccctgaagcattccgtctttggaaatatccgtacagatgacatttttaattcctttatttttatatttgagaataaaatcgattacatccagttggctttcttccagccagcccgaagtttttatcttgcggttttcgcaatcggctccgagaataattttttccggaccgtatttttcaatcagatcgaaacagaaatcgggatcctgaaccgcaatacttccaatcgtaatctgctttgctcccgaattaaaggcaatttcaatgtcttccagagttttcagtccgcccccgaaatcaatttccagagaagtctcttttgcaatggtttctaaaaccttttggttaacaatatgcttcgattttgcaccgtcaagatccactaaatgaagatatcggatgccaaaactttcaaattctttggcaacttcaagcggattttcattgtatatttttttagtatcgtaatctcctttcgacagacggacgcattttccgtcgatgatgtctatagcgggaataattttcatattcagttttattgttttaaaaaattttccagtaaacggcttcctatatctcctgatttttcggggtgaaactgcatcgcataaaaattatccttttgcagagaagcgctgaacggcaaaatgtaatcgcaaactgacgttgtattttccgataattcgcaatagaaactgtgaacaaaatacacatcgctgttttcttcgatgcctgaaaatattccggatttaaagtctgaaattgtattccatcccatgtgcggaacaatattctttgcaggaaacttttttacatcgatatcaaaaattcccattccgactgtatttccttcttcattatttttacacatgagctgcattcccaaacaaacgcctaaaacaggctgttttaaagtcggaattaactgatccagacctttttcttttagtaatttcatggtagaagatgcttcacccactcccgggaaaatcactttgtcggcttttcttatcaggtcaaaatcatccgtaacaatagactctaccttcagtctgtttaatgaattctgcacggaactgacatttccgccgttgtatttgatgatggcaatcattataaacttcctttggttgatggtaaattaaaattcttgtccgtctgttttactgccatttttaccgctttggcaaatgctttaaacacagattcgatcttatggtgttcgttatctccttccactttaatgttgagattacattttgaagaatcggtgaacgatttgaagaagtggtaaaacatttcggtcggaacatcaccgatcttttcacgctgaaaatccgcttcccacattagccacggtcttcctccaaaatcgatggcgacctgtgctaaacaatcatccatcggaagaagaaatccgtaacgttcaattccttttttctttcccaaagcttttaaaacagcttctccaagaacaattcccgtgtcttcaatggtgtgatgctcatccacctgcaaatctcctttgacattaattttcatatctaaatttccgtgtttggaaatctgttcgagcatgtgatcaaaaaagtgtaatccggttgaaatttcagagtctccacttccatcaagattaacttcaatttcaatttctgtttcattggtttttcttgagactttggcttttcgcggaatattcgccaaaaactgtgcaatttcactccagttttctgttgttagatcggcttcttcattctgaactttactgattaatatagattttgagcctaagttttttgccaactgaatatctgtaagccggtctccaatcacaaatgaattttcaagatcgtaatctccgtaaatatattttcccaacattccggttcccggttttcttgtcggcaggttttcactttcaaaacttctgtcgatcagaatatcattaaaaataattccttcattttcaaaagcttttaacattttttcctgtggtttgatgaaatcctcataaggaaaactttcggttcccagaccatcctgatttgttaccattaccagttcaaaatcaagttctctggcaattcgggaaagattctggaaaactccgggataaaattccagcttttcaagagaatcaacctgaaaatctgttggcggttccaagattaaagttccgtcgcggtctataaataatacttttttcattttacttttcttttactttttctacacctcacaggttttaaaaaatctgttaggtttcaatttaattaaatactttttaagacgttaatcagcttattgttttcttctctattacccacattaattctgatgcaatccggaatctgcggacttcttttgctcgtcagaatttcattttccagcaatttccggtacaccttatctacgttttcaaactgaatcaggaagaaatttgcgtcgcttggaaatacttttttgatgcagtttattgtctctaattcattacttaaccaggaaatttcatttaaagtattttctacattgaattttacaaattctttattactaataagttccgatattttatttaaacttaaagaattaacattgtacggagatttaaccgtattgatcagttgaataatctcttctgaagcatatgcaattccaactcttgctcctgccattccccaagctttggaaaacgtctgaagaacgataagattgggaaatttttccaacagttcaacacacgatttctttcctgaaaattcaatatacgcttcatcaaccacaacaattccgtcaaaattctgaatgtaaaattcaatatcttcgattgaatttccggtaggattattgggcgaacataaaaagaaaacttttagtttttcttcgcttgagatttttaaaaactcttctttatcgatttcaaaattttcattcagattcagtttgaccactttattttcattgactgaagcatagaatccgtacatcgcaaaagaaggattcatcatcagaatagcatcttttttcggttcacaaaaaactttcacgataagatcgatcagttcatcgcttccgtttcccactgcaatctgcttagccgaaacatctttcaaaactgccaatttttgtttcaattctttttgagtagaatccggataacggttcagttctccgaatgcgctttcattcgcatccagaaaaacaggattttcaaatgtattgttgtctctgaaactcacataaggctgcagttcaagaatattttttcttactaaatctttgatattaaattctttcattctgttcttttaatctgatacttactgcatttttgtgagcaaaaagcccttccgcttcagccattatttcaatggtttttcctaaatttttcaatccctgttccgacagattctggaaagtaattttcttaacaaaactgtcaagagaaaccccgctgtaatttttcgcaaaaccgttcgtaggaagggtgtgattggttccgcttgcgtaatctcccgcactctcgcatgaataatttcccaagaatacagagcctgcattctgaattttcggaatataatttttaaaatcattgactgctaaaatcaagtgttccggagcgtacaaattgctgaattccaaagcttcatcaattgaattcagcaaaataaagtagctgtttttcaaagattctgccgccatttcatttctcggaagtgcttcaagctgtttttgggttttaagaatggtttcattaagaattttctcgtctgtggacaggaaaatcacctgactgtcactgccatgttctgcctgagaaagcaaatctgctgcacaaaattcaggaactgctttttcgtcggcaatcacaagaacttcacttggtccggcaggcatatcgatggcaatattgtagttttgcgcatattctttagcggctacaacatattgatttcccggcccgaaaattttgtagacattcggaatactttcggttccgaaagtcattgctgcaatcgcctgagcgcctcctgtcttgaaaatctgcgttactccgcacaattttgctgtatataaaatggcaggatttacattgccgtttttatcgggcggcgtacagagaataatctctttacaacccgctaactgagccggaatagcaagcattaaaaccgtagaaaacaacggcgctgttcctcccggaatataaattcctactttttcaatggctcggttttctctccagcaaaccactccttttgttgtttctattttttcgatcgtaggaatttgtgaagcgtgaaatctggtaatattcgattttgcttcctgaatggctgtttccagttcttcactgatcagattttcagcggcttcaacttcttcttcagaaactttaatgctgtttatttttgcggaatcaaattttttagcaaaatcaatcaacgcctgatctccgttgttcttcacttcatcgaaaattccggcaacgatttctgttaatctttctctttttataacgggtctttttgttaattcagaccattgttccctttcaggatatctttctatttgcatattaaatcaccattttatcgattggaattattaaaatatcctgcgctcctttgtctttcagttcatcaatcacttcccagaaacgcgcttcgtctatcaccgaatgaatgctgctccatccttcttccgccaacggaattaccgtaggacttttcagcacaggaagcgcttttgaaacttctccgatcttgtcgttcggaacgttcatgagaatatattttgaattttttgctttaagaacggctttaattctgaagagaaatttttcaagaattttggttttttcttcatccagtctgaatgtttttgccagaacggcttcagaagtaagaatagtaacggtttctcttaatccgtttttgaagagggtgcttcctgagcttacaatatcgcagattccgtcggcaagaccgatattgggagcgatttctacagaacctgaaataatgtgaatgtctgctgaaatattgttgttatccaaaaagtttttcagggtattcggataagaagtggcaattttttttccctgaaaataggtgatgtcatcggtttcaatttctttcggaacagccagagaaactctgcattttgaaaaacctaaaggctgaacgatttcaatttttttctgtttttctaccagaagattttctcctacaatggcaatatctaccactccatcttccagatactgaggaatatccgaatttctgagatacatgatttccatcgggaaattttctacggaaacttttaactggtcttttccgttattaacgaaaataccgcagtcttttaagagctgaagagattcttcgtaaaggcgaccgcttttctgtatggctatttttaatttactcatttcacttttttgttgtgcctgagtaaaaagatggtttggaaataaattgcccgggatgaatttagaaacaaaaaaccgcctgtttactcagacggttttaattattttgatttttaacataagtacatatcaatcaattccgtcttagcagagatgatgatgataatgatgtactgttaaaaaattcggtttcattgttgaaaattgtagtacaaatgtagggcttatttttaaactgccaaaaaatttacgaaataatttttcggtaaagattcatcaggttattggcaatcggttcgtcgttgaactgctgaacgaagtgaaaacctttatcagcacggcgtttacgttcggattcgttgtcccataaaaatttaattttagactgaatatcgagatgattttccggatctacatagacggaatcgggaccgcccgcttcgggaagactgcttgtattgcttgtaataactactgtttttgaaaataatgcttcgatgacgggaattccgaaaccttcgaaaaagcttggataaacgaaaatatcggcaagtttgtagattgcagcgagttcatccatagaaactccttcgagaaactgcacgctgattttatgctgctgtacaaactgttccactttcctgaaatattttgtttttttgccgacaaccacaagtggaatattcgtgtccttcaatgcttttaccacattgagaagatttttacgttcttcgatggttccgacattgagaatgaatttttccggaagactgtatttttctttggttttctgaatgaattcttcggactgctgttctttaaacgctttatgacatccctgataaatgacttcgatctttgattcaggaacttttaaaaactggataatatcgcgcttggtctgttctgaaatggcaatgattttatcggcagagtttgcggcttttctgaatttccagaagtgaattttacggtcgaaaaaggaataatattgcggatatctctcaaaaataaggtcgtgaatggtgacaatttttttgataggttttttatcccatttcaaaggcaattcgccggataatccatggaaaatatcagcgttctgtttttgtgcatccttccccattttaaactgtcgggacatttttcctttggaagtttccacaaaatgaacgttggaattttctaaaatatccgaacctctttccgattggtttttgttgagcagaatgtattcgttttcagggaaatactgtgctaaaattctaacgagatcgcgggaatagtttcctaaaccggaggtgttgtgaaaaaatcttttggcatcaaatgctatcttcatggctgtatttgtttttgaaattcctgaaatgttccgaatgaataatttttactttttaaccatgtaagaaattcatcaaatctttttaccatctctattcctgaatttttcacggtaaaaccgggtaatttaaaggcttcatcttttatttctgcaaattcccacggatgaaagtagatgttgagatatttgtcttttttcaaaacgtcggaagccagttttttgtagaaaaacaagggaaaattgtgaaaactcagccaaaacaacgggattctgaagttgggtgaaacggaagccggaatctgcaccacatttccttcgttaaaataagttcttgatatttttaaattattatatcttccgggaagataggttggattgatagacgaattgtaagaatatcctgcattttccacggcatttttgcttacaggcatcattctgggcattcgaagtcctgtaacctgtgttgaaaaaagttcttcgagtcgttctttggactctttaaggtgtttttcttcaaaatctgaatgaaaccatgtgtgagaagccaattcgtgaccttcatataacagtcttctgataagttctttgctgttttctgcaaaaactacggttgaaaagaacgttgcctttgcatggtgttttttgagaatatctaaaattctttcgacgcctttctgtgaaattgagatttgctgttcaaaggaaatttcgcctttgtattcgaatggcatatcaaattcctcgatgtcaaaacttaataaaaccatttaaaaatttttatttttgatgatataattgggtctttcttttacctgtttgaaaattttgcctaaataaattcccataattcctaaaataatcagttgcagaccgccaaaaaatacgatggtcataattaatgaagcccaacctgaaatttcggtttttgccacaaaggaataaatgacgtacaaaccatatccgacaattgaaaatgctgaaaaaagaaatcctaaataggctgcaatatacaatggttttacactgaatgccgtaattcccgtaaatgcaaaagtgatcattttcttgaggttatagctgctttcgcctgaaagtctttcattggctgtaaattcaattccggtctgtttaaagcccatccagcttgttaaaccccgtaaaaagaggtcatcctcgttgaaagttctcatgacttccacggcattcgcatccatcagtctgaaatctgaaccgcctccttttgttaaattaacatcggataaactcgacaggattttataaaaaaagtcggatgtttttcttttaaagtaggaaatctgcttcggataggttcgaatcgtaaaaacaatgtcgtagccttcttcccatttccggatcatttctggaatcatttcgggaggatgctgcagatcgccatccatggaaatgaccgcatttccgaaagcgttgtccattcctgcttttacggcgggttgatgtccgaaattacgtgaaaattcgatgaattttacttcgtcatattttgcggaaagttcttcaagtttctgctgggttttgtctcggcttccgtcgttcacgaaaataatttcaaagccgtaatcatccagtccatcaaaaacttctttaattttctgatgtaccaaagccacgtttccttcttcgttatgcgcaggaattacaattgaaatttttttcataatcagttcaggctgtagtctttttcgaagtcttttgttaccagttcataaatgatcctgaaccagacaacgatgcaaggtaaagcttttagggaatatttaacaatataattctgttttataaattttggaaataagtctgatggtgaaaaacaggtcagaataattacgaaaatcaacatggcataaacaatcggtgttctttttttctgaaggaaaaaccagatcatcactcccgctactgcaatgatgtaggtgggagattctgatcctgaactgaacagtactaaaaatagtaaggttgaagccagaatcatgagttgatacgcgtaatgtttgtactgtttaattcttacatatggcaaaaagaataatggcgctccgaaagccataaaagtaagattggagattgaagcatcctgcaaaattcttcttacaaatcccattaaagaaatgtcctgataagaatccagactttgattgagtccgtttttttcagccagagaatggaaccagtctgtatagctctgtatgacaaactgagggctggaaattgccatcggtaatacaaaaaataaagccgcaactgcaattccggacagaataaatttgagcttatttttgatgaagaaaaactgagatagtcccaaaattccgtacagttttacaaatactccgactaaaatggctgtagcagactgtacttcttttttttcataaataaaaatggcagacaacataagcagtcccactaaagcaatattgaactgaagacttaccgctgctgtaatatattcctgaagacaaagcagtgcaaaaagtgcctttttagcgtctgaaaacggaagtttgtaaatggcaaacaggaaaatggctgcgttggcaacgttccataaagaaattccaagccaatcgggaatcaaagcaaaaggagcgatcagaatactgaaaaatatcccgtaatgattggcatctaagtatctttcgggatactgtaagtagagatttttctgctcgatggtattcacgaaaacatttttgaagatcagataattgttaatagcctgtggccctctgaaatatttggataacgccgttgcaacagctataataagataaaccccaaatatgtatttagggtttagcaatattttaagaattttttctttcaagatgtgaggttttagtttaaaatattcatcttaaacagcaacattattctctctcaacgcatcatttaaagacgtctttttgtctgtagattcctttctttttccgataatcaatgcacatggaacctgatattctcccgcaggaaaggttttggtataacttcccggaataactactgatctcgcaggaactcttcctttgatctcaaccggagtttcacctgtaacatcaataatttttgtagatgccgttaaaacaacattagctcccaaaacagcttctttttcaacatgaactccttctacaacgatgcatcttgatcctacgaaacaatcgtcctcgataattaccggagcagcctgaagcggttctaaaacaccaccgataccaacaccaccactcaggtgaacgtttttaccgatctgcgcacagcttccaactgttgcccaagtatccaccatagttccggaatcaacgtaagcgccgatatttacataagacggcatcataataactcccggcgcaatataagctccttctctcgcgattgcatgcggaacaactctcactcctttttcagcgtagtttctcttcaaaggcattttatcatgaaattcgaacggaccgacttcaatcgtttccattttctgaatcgggaagtacattactactgctttcttcacccactcgtttacctgccatccgttttctgtaggttctgcggtacgaagctctcctttatccaccaaagaaatcacctctctaatcgccttctggctgtcttcattctgcaatagttctctgttttcccagatattttcaatagtttgttgtaacgacatgtttattatttaatttaaattgaaaaattatacgctgccaaagatacaaaaaagatcagcaaaaccttttgaaagtattttgtttagaacgaaacttgtttaaacttttttaccgcaaaaggagcaaaagatttaaacactttagtttcttaagttcagtttaatagttaaatagaaaaaaagtgcacctaaattttaaaaaatcaaagattttttctgtttgcagacttttgaaataaagtcttttgtatcctttaaggttaaatttaaaattaatttaaaacttcatgattttaatattccggatgctttgaacaatgttttaatgtaattgtataagccacatacgatttaagtaaatcaaaatcggctaaagcagaaatttatgatatgttttggctaaagccaattgtattcttaattatttaaaatgggctaaagcccatttctattgatatattagatagcatgaaacgcaatctttagaacattgccgcattacagatatcaatcctacggattgatcgttggtttctttattactatttctacatagattctgctcctaaaggagcaaaactcttttactttaaaaatcttatgtttttatttattaaggcgactcaaaaatcgatataatactttaattatcagaaggtattgaaatttactttgtttaaaacattgaaaaacaaaacagctaaacaacttaaactacagaactctctgcgcgtgaagataagctttgttccagtaggtttcatttaaggaagaaatgataacgccttttgatgtggaagcatgaataaattttacttcgccgtcacttccgatgtcgtgaacgattccgacgtgtgaaactctgcttcctcctgctgtcgcaaaaaacagaagatctcccggctttacatctttgatgtctatctgagatccggcttctgcctgatctgcggatcttctcggaagtttgaagtcattttcctcaaaaacttttacggtaaatccggaacagtcgaaacctgaagaagtatttccgccaaatttgtaaggcgcacccaaatatttttctgcgtctttcaggagctcgttgatggattttgaaattttaccgtcaaatctggaatcaagttttctgaggttttcagatttggcaacggttttggtaaccggagttttttttacaacgttttttgaacttccgcaggaaatgataaatacggaaaaaagcgatacaataaatatgtttttaacaaacttttttttgcctaaaaatctattcatcatatttccctgaattttacaatctatacaaatataataaaattatgctttcgcagagctgaactaagaaataccacaaaaattttaagactgttcatttgaatgatgttatttttttaaactcaaagaatgcgaagttttctttttaaaattgtctgttgatttttgagcctgacagagacattagatgtttaaactttattaccacaaaagatttaaacactttagttttttaagtttaatacttaattgaaaaaaaagagcacataagttaaaaattaaagattttttctctttgcagacttttggaatactttaaataaatccaataaagtctttttcatataaccgctgcttaaaaacttaataaaaaaagccatcccggaaggatagctttatattgtatgtaaaaatctttttattttgaagttttagcacctttccatgttccggctcttgtaggcgtaggaactgcattagaccatgttcccgtagcttttttgtcttctcttgtgaaagttcctctgaattcgccatcttcaggaaaaccgatcgttgcaacaagatctccggattcgctaagatgtcctgaaatataatagttttctgttgtttgatcagaatgtaatgttccggttacttttccgtcggtagctaccactacattccagtcgcctttttcggttccttcgtacgttcccgcccaggttccgatgaaatcataaattgtatcttcatctttgccacaaccaacgaataagaaagctgttaataaaagtaaaaatattttcttcatagtttacaagtagttaaacaatttttgtggaggatatgggactcgaacccaccacctttagactgccagtctaacgctctagccagatgagctaatccccctctcgttttcttcaaaattccgaagccgtacaaaagtaagtatttaaaccacatatacaaacattttattacattttctttaaaaactgatggaaatatctgtaaatattttagcagaaatgatttttttaagaccaaataaaaaacgcatacagaaataaatccgtatgcgcttttctttttacttttattgtcagaatttatttccaaccgccgccaagagcctgataaagctctattccggctttcattttactgtactgtgcattggcaatattcaattctgcatttaaagaattaacactggcattcagtacctcaagataattcgccattccatagtttactaattcctgagaatagtttacagaatttttataattcacgagttctttctgttttaaatcaatgtactgatcctgaacggaatacactcttatggcatcagaaacttcttttcctgcggtaagaatggctttccggaaattcagataagcggtttcctgattggcaagacttacttcgtaattggttctgatggctcttttgttcagcaacggctgtgcaagacctgcaacaacgttcgcaaataaagaattgacgctgaaaaggtgatcgatatccaccgactgaacgcctccgcttcctgttaattttaaagtcggataaaactgtgcttttgcagaatttgtcagttcgaaagcattcatcagattatattctgctctttttacatccggtctgttggataacagttgtacaggatatcctaatttaagatcaatcggaacattctgattttccaaagatgagcgttcaatggtatgagatggctctcccatcagaagactcatggtgttttccagcaactgaatctgtgtatcaatatcaatcaacaaagattttgcgttgtacaccaaagcttcactctgctgaactgcaacttctgttaaagttcccgccgtcttcaaagcttttgtcgtctctaaattctgctcacgtactttaatggtttctgtgatgattcttttctgagcatcgtaggtaagcaactgataatatgatgaagccacagaagcaataaggtctgtttttaccgctttgtgagcttccacagtccctaaatatgttgctaactgcgctttttcctgtgctctgagttttccccaaatatcggcttcccaaccaagacttgccgtaatatcgaactgatttacatatcgtctttctccgataatctgcccgaactgggtattgatagactgggtctggaatgtgtaattgggtcctattgataaggttggctcatacgctgccttactttgttttaaataagattctgctgaagaaatactctgtaaagcaattctgatgtccagattattttccaaggcctttgtaatgtgtccctgaagaacaggatctgtgaaaatttctttccaggaaacattcgcgatattggtgctgtctgtaggaagcatatctgtacggtagagtttttcgtctaccacattatccggtctctggtattctttcctcgccatacacgatgatacggcagcaagaacggcgactgaaaatgttattccttttatgatgtttaaaatactcttcattatttgaagtttaaggtttaaagatcagggcttttcagtttttagttattatttaaactttatatcaaaaaccccgaactcacttaattttattctgctaaattgatttctttcggtttgataggttttactttctcctgtaaatattcaaaaatgacatataaaacagggatcacgaaaagtcctaaaatagttcctatcaacaaaccgattgctgctcctgttgcgatggatctgtttcctaccgccccgattccgcttgccaaaaccaatggcaataaaccgaagatgaaggcaaatgaagtcatcagaatcggtcttaatctcgctttagccgcgttaattgccgacataacgatggtttctccgtgatgtcttctctgaacggcaaattccacaatcaaaatcgcattctttgctaataaaccgaccaacataatcagggcgatctggaaataaatgttattttccaagcccatgattttctgtccgaaataagctcccatcactccaagaggaagagaaatcactacaattaaaggaagaatataactttcatactgtgcagaaaggatgaaataaacgaaaatcaaactcaatccaaaaatcaatactgtctgagatccggaatttaactcctctctggaaagccctgtaaattctacatcataattctggttcagggtttctttcgctacctgctgcactgctgaaatggcatctccggaactgaatcccgcagagtttgctcctgtaattttcaccgaagtaaaaaggttataacggctcaccgactgtggtccgtaagctttggtaagcgttacaaactgtgagatcggcgacatggctccggaacctgtttttacgtagagttcgttcaggttttcaatattctgtctgttttcaggaagagcctgaaccattaccctgaactgttttccgtattttgtaaaatcggctgtataaactcctccgatgtatccctgcatcgttgctaagatatcacttacagaaactcccaactgtttagccaaaggaacattgatcttcatttcatactgaggatattttgtattgaatgaagtctgggcaaaatcgatttccggtctttcgatcagtttcccgataaattcattggtttttgtatccaaatctgcatattctcctcctgatttgtctaaaagtaccatttcgaaaccggcactgctaccaaaaccgggtacactcggcggctggaagaaaaccacttttgcatccggaacttttcctgaaatcccgaatagtcttttcgtaatatcttcagaagtctgcccgtcttttttacgttcttcaaacggttttaatttaatgaaagccaaaccgttgttgcttccgtttccggataagaatcctctaccggtagaaattgtaacgttttgtactcccggaacttttaaagcgtttgcctgaagcgtcttcaatgcattgtaggttctttccatagacgctcccggaggaagctgaacatcggtaaagataattccgcggtcttccgtaggtacgaaaccttttttcatggtagaactcgcccagtataaaattccgcctgttacagcaaaaataatcagcgtaacccatttgtgtctcagtaagaagatgaatcctcttccgtaacgttctgttgttgttttaaaagcaatattgaatttatagaaaaacttctgaatgaaatttaaattcttatattctttatggtgcgcatcgtgaggttttaagaataatgaacataaaaccggactcaacgttaatgcattgatcgcagaaataatgatcgctacaataagagtgatcccgaattgctgataaaaaactccggtaggacctgtaatgaatgttaccggaataaatacagatgccattaccaaagtaattgaaataatagctcctgtaatttcgtccattgcttccacggttgcttttttggcatccgaaataccgtgttccattttggcatgaacggcttcgacgacgacaatcgcatcatccactacaataccgatcgcaagaaccaaagcaaataatgttaacagatttaatgaatatccgaataaattcaggaagaaaaaggctcccacaatagaaaccggaactgcaattgccggaattaaagtggatctgaaatcctgtaagaaaatgtacaccacgatgaaaaccaaaataaacgcttcaattaaggtatgcacaaccttttcaatagatgcatcaaggaattcgttcgtatcaaagttgaaagtatatttaattccctgcggaaaacttccttctgccgatttcaggtaagacttgatatttttaataatttcctgcgcattagaacccggtgtctggaaaatccccatactgatggaaggattatttccgttttccccgattcccgtgtaagactgtcctgccagttctactttggcaacatcttttaacattaaattctgtccgtctgctaaagatttaatgatgatattatcgtattgttctttatcgttgaatttccctacatatttaatgatatattcgaaagagcttccgctgttttgtccgatagaacctgcggcagcttctctactttgctcattgatggcattggtaacatcggtaggcgttaatccgtaagctgccattttagcaggatccagccagattctcatagagtaatttttacctccgaaaacattggcatctcctactccgttaatcctttttaagttaggaataacattgatgttcaaaaagttctgaagatatacatcatccagatctttattttcagaatagaaagacatatacatcaaagcacttgtctgctgtttctgggtaaccactccggaacgtgttacttcacttggaagtaaaggagttgctcttgcgacacggttttgtacgtttaccgccgcaatgtccggatcaattccctgcttaaaaaatacctgaatctgtgcagaaccgtcatttccggcagatgaagtaatataatccattccttccaccccgttaatctgttcttccagaggaacaaccacacttttcattacggtttctgcgttcgctccggtgtagtttgccgagacacttaccgtcggcggcgcaatatcaggatactgcgttacgggtaacgagatcagtcctaaaacaccgagaatcacaattaaaattgagattacggtagataaaaccggtctgttgataaaatttttaatcattagaatttcggttttatagattgaacaagactatccattttcacaggtttctttatcacggcagttcccggttttaaacctccgattcctgctgcaactacggtttcccctttgttaactccggattttatcaatgccatattgtcgattctgtcgatcacattaatcaccacatttttcgcagtgtctttatccactttatatacgtaaacaattccctgttgttcgtaagtcgcactttccggaactaccagaacattgtcgtaacgttgagggaatctgatggttccgctgtttccgttgcttaaaagtttctgcgcattggtaaatgcaactctgaactggatggttcccgttgttggatcgatctgtcctgtaatggcttctattcttcctttttcaggataaagacttccgttcgcaagctgtaattctaccatcggaaggttttttattttttcgggcatggatgcacccggagatttttcaaggaaatcaaaatattctttttcgttcattgaaaaataggcgtaaatctgagaagtatctgaaatggtggttaaaggagtctggtctgaaggtcctaccaaacttcccacttttaaaggaagctttccgattactccggaaataggcgcacgaataacagaatattcgatattggcttctactcctttataattggcaactgcctgactttttgcagcctgtgcctgttttagctgcgcctgagcctgtgctaaatttgcctgtgcggtctgtaactgaacattgctgatgatgtttttctgaaccagcggtttaagtttgttcacttcaacatttgccgccgcaacagcagcctgagctgccgcaatattggattctgcagcactgattcctgcttttgaagccgctgcattttcgttcagaatattggtttccaggcggaaaagcggctgtcctttggttacgtattgtccttcatctaccaaaacctgtgtgatatatccctgaattttagcacggacatcgttattaaccttcccctgaatggtagccggaaaagcctgatagcccactatattttttgcctccacctttaccaccggatacggtttcgggccgtcctgcttcggagcttcttttttgcaagccactaaagagagagctgcaacagaaagtataactagcttattattcatttttatagtttattaagagattcctgaatatttttaatgttcctgtttaaaagagctttataagcttccatcttttcattgtaatcgtcatgattttttttaaaattgtctaaatcatccagtagttgtaattcgtcttgcattttttgaactattttttcaaatcttatcttcttataaccgtcattgatgaaaaaataccgtttcctctcgtccattttgttgtgatctacgatgagctctgcgttcagcagtaaagaaatacttgtagagaccgaacttttgctcgcggaaagcactttcacaaattcatcaaaagtaatgcccactttatcataatcgaataaaaggtacgcgtaaatctttgaagctaacggcggaaggctgaaaatggtaccgtagaactttacggcattctgaaaaattttttcatcaatttctatactcttatgcattgtatataaatttgaaacaaaaatagaaattagttctgaactaaacgaacaaacctgatagagtttataaatatcaggctttttaaaatttcaatgaaaacggatttaacttttggactaaaaaataatcttctcaaaagcttttcttacgcctcccgcgagaacaacttcgccgcagtagctgtagcctttgttctcgagaattttcagcatcggaatattatcatagttggtatcgaccttaatgctctgaattccatgagatctggtgaattcttcaatatggtcgaaaagaatttttaccattccctgtcctgcaaatttttcatcaacagcaactctgtgaaccacgacgaattctccgttacttagccaggctccttcaatggtgctgtatgcgggttcatcattcaggattaaagcaacgtaaacagaaatttccccatctaccgtcattacatatccgaaaccttttgcaatatcgctttccacggttcccaaattcgggtaaccttcctgccattgcgtacttccgtcttttcttcttctttcgattgcctgctgcagaatattccagattatatctctgtcttcaatttctgctcttctcagcttaatttcctgtgccacgtttattctattgattttaagtttgtttattaagaatcagttttattatttctgtattttatttttagaaacatcatcagaatcagcataattaacattaaaacgtttgtaatccaaagaggttttgcatccttcatcatttcgtaaacagcccaaagcaaagcgtttaaagtaagaaatgataaagtaaccattgaaaggtcttttccggattttgtcttccataattttatgacctgcggtaaaaatgagatggatgaaattaatgctccggagtaacctattatctgttctatcatattttgtttttttgaattattacctaatatactaaaaataaaacaaagcttaaacgttaaaccatacatattatttataaaaattagattattattttcaaaaaaatacatttttttctgatagatcttcaaagaaaaaaaccgaaaactaatttaaattaattttcggttcgaagtagtaaaatttaaaattatgaaattgttttttattaattttcactttgctgaagataagcatcgataatttcaaatgcttttttttcatcttcaagtttaaccattactttcagcgatgtcgccgtgggcgtagttgtaaaagtaaggtaattgttttctactgaatttttaatctgcgcatcatccagtttagactttatcaattggatttctgcaggtttgtcactttcaaaaactgatactcttgtacttctttccatattctatctcgtttgagtatctaaatatataacgtttttttgaaaatcacaaatttcagcttttaaattttatgaatattattttcgattttatctaacgcgatctgaatttcttctttggtaacgttcagatgcggtctgaagcgaagtgactgatctccacatgaaaggataatcattccgtcgttccaaagctcgtctcttaatgcatttctctgctcagaagtcggaagatcgatggcacacatcagtcctcttcctcttgcattggatagtttttcaggatatttttcagcaagaccaatcagtccgttcagcaaatattctcctaccactcttgcattttccacaaggttttctttttcgataacttccattaccaactggaaacgaagcatatcgataaaattacctccgaaagtggaattgattcttgagctttctctgaaaacattgttcggaacttcatcaaatttttctttattggctaaaactccgcaaacctgcgcttttttaccaaaagaaataatatccggttttgctgtaaaatgttcaaatgcccacattttacctgtaattccgataccggtctgaacttcatcaaaaattaaaagaatatcatgctgatcgcaaatctttctcaatcccattaaaaattcgtctctgaaatggttgtctcctccttcagcctgaatcggctcgatgatgatacatgccactttatccggattcattaaaatcgcttcttcgatatttaataaagccagtctttcatttttaatggtctcttccaaattctcttccgtgatcgggaaagtaagtttaggatttaggattcttggccagtcgaacatcgggaaatactgatattttctgggatctgaagtatttgttaaacttaacgtatacccgcttcttccgtggaatgcctgtttgaaatgaatgcagattcccgcttccagattaagacctttttcaaaatttttacgcgttttccagtcgaaacacgctttcagggcattttctactcctaaagttccgccttcgataaagaaagcatattgcagttcttcaggaattaccactctttcgaaaacttctaagaaatgcgcatattcttcagaatatacatctgccagagtgggtttgttgactgccatttttcccagccatgccgatttttcaacaatatagggatgattgtaaccgatggatgccgaagcaaacatggaaaacatatctaaatattctttgtctgtaagtttatcatacagccatgaaccgtgggatttttcaatatccatcacgaaatcgaaaccatctgccaaaacgtgtcttccaacggtttcttttactttatttgcttttatttcaattgtctgttccatttttaaataaaaatcttaggggtgatttaaaatttaataataatttgagacttaaaaatctgtttccaaatttttaaactcatgatgttagtttttaaaggtcaaacttaattccctgtgctaaaggtaagtttgtggtataattgatggtgttggtctgtcttctcatatagtacttccaaacatccgatccggattctcttccgcctccggtttctttttctccaccgaaagctccgccgatttccgcacctgaagttccgatgtttacattggcaattccacaatctgaacctgcatgagaaaggaataattctgcctctcttaagttctgcgtcatgattgcagacgacaatccttgaggaacatcattctgaatagcaattgcttcttctaaagttttgtatttgattaaatataaaataggtgcgaaagtttcatgctgaacgatttcataagaattctttacttcagcgatacatggttttacgtagcaacccgattcgtatccttttcctttcagaacttcaccttccacgatgaattttgcgccttcttttttgccttttttaatggcttcctgatacatatttaccgcatcggtatcgataagcggacctacatgatttgtttcatccagaggatttccgattttcagttgtccgtatgcttttaccagtctgttctttacttcatcataaacactttcgtggataatcagccttcttgtggaagtacatctctgtcctgccgttcctacagctccgaaaactgctccgataattgacatatcaatatctgcatctttagaaatgatgatggcattatttccgcctaattcaaggatcgatttcccgaatctctgcgcaacattcgctgaaaccattcttccgactcttgtagaaccggtgaaagaaactaaagcaactctcttgtcatccactaatttctgtccgatttcatgatctgcaaccaatacgctggaaataccttcggaaaggttattttcctttagcacttcgttcatgatgttttggcaggcaatcgcgcaaagcggcgttttttctgacggtttccagatcgtaacgttaccgcagatccatgctaaagctgtgttccatgcccaaactgctaccggaaagttgaacgcggtgatgattcctacgattcccaatggatgatactgctcatacattctgtgtcccggtctttccgagtgcattgtgtacccgtgaagctgtcttgaaacccctactgcaaaatcgcagatatcgatcatttcctgaacttctccaagaccttcctgcagggattttcccatttcataggaaaccagtttccccaaatcgtctttgtactgtcttaatttctgacctaactgtcttacaatttcccctcttttaggagccggaatcagtctgaattctttaaaagctttttcagccgtctcaattaccttgtcataatcagactctccggaagtcttcactttagcaatcagatttccgtctacaggagagtaactttcgatggttttccctgatgcaaagtattttccgcctactgaagttcccttattttcatccttaattcctagatttttgagtgttttttcgatcccaaaatcctttacttttttagacataaaaattttacttttcgtttcctctaaagatagaaatattatgcgaatcccaaaattttaattttttaacatgttttttatttggactaattataaacatagttatatttgtataggaatcattttatttcaggaatggaaaataataagattaataacgaacctgccacagaggaaaaaaaatcctccagatggaaaagccttgtaaaaaaattcgggatcggcggaattatattttttaccgtaaaaggaattattacttctacgctgatctattttctggggaaaaatttctggacggtgatctccgattatgttacgggaatatttgattaattgattgatacatacatacaaaaagctgagaaaatttctcagcttttgttttggattcaatgtcattcgaaatgaccatattttttcacctattctttctttttccttcccgaattaatcaggctctgatgcagcaaatactcaatctgtccgtttacactccgaaattcgtcatttgcccatttttccagaagcttaaatgtagactcatcaatccttaaaacaaaagattttttgcctttattttcggaaggattctgagctttttctgatttcatttttgttaattctttttgttttcaacgcaaatggcgcaaagatttcttttaattattgtgaatatttttcgttcgaaaaggcgcttcactcagcaaatgctttatgtttgtcattctgaatgaaacgtagtgagatgaaaaatatcgtttttttaactttactttaaagagatttctccttcgtcgaaatgacaaaatacattgcaaatctttaattatacaaagttccggcatttaaaatcggttgtgccgctttttcaccgcaaagaaccaccattaaattgctcaccattgcggcttttctttcgtcatccagttctacgatattttcttccgaaagctttttcagggctaaatctaccattcctacagctccttctacgatctttgttcttgccgctacaattgccgttgcctgctgtctctgcaacatcgctcctgcgatttctgacgcgtaagccagatgtgaaattcttgcttcctgaatggtaattcctgcctttgaaagtctttcggtaagttcctgctctaagattgcattgatcttttcaccgccttctcttaaagtaatcggtgcatgatcgtcttctaaattgtcgtaaggaaaactcattgccaaatgacgtaccgcagcttcactctgcattttcacaaaatctgaatatctttccacatcaaaagccgctttgtaggtatctcccactttccagacaatcacaactgcaatttctataggatttcccatcttgtcattcactttaagagtctgtccctgtaaattttcagaacggagactgattttctgtgaggaatataaaggattgataaaaaacaaaccgttgtcttttacagttccgacatattttccgaaaaagttaagcactcttgaatgattaggctgaataatcattaaccctttcatgaaaaagcaaaacagaataaatgacaataatgataaaacgacaagcgtaacactgttatcgacaccgattgcaaataaataaacggaaacggcaaacaatccaagacaaatgaccaaagtaaggtatcccgacattggttttaagattttttccatgatattaaattttaatttgatattattttgatatcataaaggtataacttttttcacatgaaaaatcttttattttaaaatttattttgacttgtcggttaaattctaagcacaaaaaaatccctgaaaaattaatttcagggatcgtatgtatgataaattttaaatttattttttatttaaaattctgaacttgtaataagatgcggctgataaaagtgccattgttgcaagtccgatgtaaacccaagccggaaccggaaccggatctcccgctgcgtaagagtgaagtccgctcaggtaataatttactccgaaatacgtcatgaccatcgagcagaatgcaaacatcgtcgctacgtggaatgcccatctgcttcttaatcccggaaccagtctcatgtgaagaacaaatgcatataccataatggaaatgaatgcccatgtttccttcggatcccagctccagtatcttccccatgattcgtttgcccagattcctcctaaaaagtttcctacggttaatgcaaacagacctatggttaaagacatttcagaaacgattaccagttctttcaacgttgtatcgtgatgcaatttatacgtttctttattggaaatgatataaaataccagactgattactgcaatgatcatcgacagtgcaaaaaacccataacttgacgtaataatcgcaacgtgaacaatcagccaataggatttcaatacaggaaccaacggtgtaatctgcggatcaagcgctgaacctccgtgagcaaatcccatcataattacagctaccataaatccggctgcaggaattaatgcgttggaatttctgtagagtaataaacctgctgtaattcctacccaagaaatgaaaataatggcttcatacccgttactccacggagcgtgaccggaaatataccatcttgccaccaaaccaaggaaatggaaaagatatcctacaattcctaaaacaatgatgactttaattgctttatttaaaacttttttaggcttaaataattcaacaaaacctaatattaatagcaatcccccgattaatgtgtagaagattaacaatttgaagttgatgttcactttattcatgaaaacctcaagatcaactttggatttcgcaggaacaacagctttcccccatttttgctgatagtctgaaagcttcgccagttgcgcatctgcttttgcccagtttcctgattgctgagcctgcaaaacttctgcaaaataaggccccataacctgctgagattccatatccggttccattttctgatccagccatgaatgccatgtatgattagcgtcgttctttaccggaacaattctcataaactgaccgctgaaaaattcgttgaagatctgaactctttcgtttaccgcaatcacttctttatcataattggtctgttcagccggttttttacggaacgcagtgttgtaatcgctttcaaggatatatcttaaatttccgttggcatctgccgggaaaagattcattaaagaagtatatccatcttcgtctgctttggttttatttttcagttcgtctccgccttttgttcctactttaatcatcggaaccattgtccagcttggcgtatcaatattcaccgataaaaaccattggtttgctgttaaagattttccgtctgttcctttaaactcgtcctttttataaagctttcttaaaacatccaaagcttcggtattaatcggaacgattcttccttcaaaattctgcaccaaaagatatccgaatttatcagcatgttctgcgctgattttatttcttgcaataatttcatcggcagaaaccactttcatttttgtaaacggctgcgctccctgtggttttaatgtttctgagccctgagcgtgactgtgattatccccttctacatggatgtgttccctgcttccgtcggttgtgccatgtgtctcaattttctgggcatttaagccgaaactcaacaataataaaattactgctgcagctttctttttgttaacgtctttcagcattttgtttaatttccagaagtgggttcctttccagaagaacataaagaacattcccccgaataagaatgtatacccgatgtaggaaatcaaagttcccaaataatcgtggtttacggaaagaacggttcccattctgtccggatcgaagctcgactggaaaaaacggtatcctttatggttcagaacgtggttcatatagattttaaacggagtctgttttccttcatcaataattttaatgtggctttcgtacgcactcggagaagaacttcccggataagtttccatgatgaaatcatccagtttaagcgagaaaggcgtattgtaaattttaggaccgaaaccgatcatgatgttcagtccgtccattgttacctgtttgtaagcattcggatttcctttttcaaccgaaagatctaccatttgctttgttttaggcccctgaagttctaccttcaacatatccggaacattctgatctttttttctgtcgccttcaatcgccatcagttttccttttttaagaccttccggaactactaattttaattcgttgatggaatataaacttctcaaagccaaaggctggaattcatctttcaccgttgttcccgttgcctgagttgccatcgtcatataacttgcatccacaggagttttgatgaacagttttccgccttcgtttttaaattcaaccgctccttcaatagctctgttgaacgttaccaaagttccgttgattgattttgtttcgcccggcttgatgaaaatattctgtcttccggtttgtcctgtggaaaccaaatgaagatattctgctccattctgatcagccagaagactgtctttttttctctgaacatattctttggcaactacttttacctgctttccgtggaaatcgtaggttgcttccagatccttgtgcaaaggagacattaaataaggaatatctttatagttaagaacatctcctttttcttcaatctgtactttcaggaagtttttatccgttacgatttcattggatgtttccccttcacgaatgtgcatagtcccttcgaaactgatgtaccttgtgattgcaccaccgatgaagatgagtataaaagcaaggtgaaacaccagaaccggccatttttctctcttccaaagtctgtatcttccgatgtttccgatgaagttgagaatgagcaggagcataatgagttcgaaccattttgcttcgtagattaatgcttttgctgtaggagtaccgtagtcgttttccaagaacgttgcataagccatcgcaaatgcatacaccagtaacaatacagccattgtcctggtcgagataagaatatcttgcagcttcttcatgatttatatacttgacatgcaaaaataaggatgataaaccacaaagactccaaaaaaaactgtcatttatcagttgagaccgcttttaatcttatttttattgattcttaataagcaatttttctttgaagaaaatttaaaatgataaaagcatcagaattaaattcataaaagctataccattgattgacaagctctatttattcagcatttttaatttttattcgattcaaattttctaaacagcaaaaaatgatgaattatttttttccagttcattttattttaaatatttttaatcatcaaaaccaaatcaatccaaaaattcttttgaaataaaggaaaattagttacttttttaagcttatgagcattcgtttaatgtaggaaaaacattaaatttgccaattgacattatgaataaaaacacacaaaacaaaccgactgaatcgcctgataagggcaaatttttatctaagccaagagtattcttcgggcttactttcattcttttttctgtagtgcttactttttcgttcgtttcttacctgatgaactggaaggcagatcagagtcaggcaggaacgatgctcgataaaagtataaaatcttccaatcttttcggaaaactgggcgactggctcggaaatatttttattttcgaaagtatcggagtggcttcatttatcattgcctttttatttctggttttcggaaccgttatcctgaaaaagaaaatgtttaaaccttggaaaacggtggggcattccctgtttttcatttgctggcttccgattctgtttggagcgattactaaaggacagggtgttttaagcggagtttacggatatcagatcatggaatctctgaatacgattattggttcttatggtctctggctggttttaattgcaagtattgctttgtattttattttagaattcaatcttcgtccaagttcaattaagtctaaattaaatgacattaatgaaaataccatcggaaaagtaagatcgatgatgccgagttctgatgaaaattttgaagcggatgaagagctgattgaggaaattgaaacggcagaacaggaagaagaacagcctaaaataaaagtaacggaagttgcagaaaaaccggctcccaaaatggcggagcctgaacctgtaaaacttccgaaaggttttccggaagttccggtatccagcaatctggatccgattgtaacgccgaataaaacttcttttgatgaggaacctaaaaatgatttttcaaactccatcaatttaaatcttgactccagacctaaagttcctactacaagcccggaacaggcttttgatatgacgccttctattcctgtaagcacagttactgcggctgcgcctcaggaaaatattaaatttaatgtagaagtagctccggttatcgatattctggatgatgccgataaaaaatctcaggaattggtagacaaacacggattgtacgatcacaagcttgatcttgccaaattccagatgccgcctgttgaattgctgaaagattacggaaacgaagaaatttcgatcaacaaagacgaactggaagaaaacaaaaataaaattgtcggattgctgaaaaactttaacgtaggaattgccgaaattaaagcgacgataggaccgactgtaactttatatgaaattgtaccggaagcgggaattcgtgtagcagcgattaaaaaacttcaggatgatatcgccctgaatctttccgctttgggaatccgtattattgcaccaatgcccggaaaaggaaccatcgggattgaagttccgagaaaaaatccgacgatggtttctatgcgttcagtgattgcttcgcaaaaattccagaatacggatatggatcttcccgttgtattcggtaaaaccatttcgaatgaaattttcatggcagatttatccaaaatgcctcacttactgatggcgggagcaacaggacagggtaaatcggtcggaattaatgcaattcttacttcactattatacaaaaagcatccgagtgagctgaaatttgtaatggtagatcctaaaaaagtggaactttcattatattcaaaaattgaaagacattatcttgcgaaacttccggatgcagaagaagctatcattacagacacgaataaagtaatcaacactctgaattctctctgtatcgaaatggatacgagatatgatctgcttaaaaatgcattttgcaaaaatttaaaggaatacaataaaaaatttgcggaaagaaaattaaatcctgaaaacggtcaccgttatttaccgtacattgttttggtagtagacgaatttgcagatttaattatgactgccggaaaagaggttgaattaccgattgccagattggctcagttggcaagagcggtgggaatccacttaattgttgccacgcaaagaccatcggtaaatgtaattacaggtatgattaaagcgaatttccctgcaagagcggcgttcagggtaatttccagtgtcgattccagaacgattctggattctccgggagcagatcagctaattggtaaaggagatatgctttattttaacggaaatgaaattttaaggcttcagtgtgcttttgtagatactccggaagtagaaagacttgcagaatttatcggggaacaaaaaggatacacttccgcatttatccttccggaatatgtttctgaagattctacgagtacagttggagcttttgatccgaacgaaaaagatgctttgttcgaagatgcagcgagaattattgtttctactcagcaaggttctacttccatgcttcagagacaactgaaactgggctacaacagagccggaagaattatggatcaactggaagccagcggaattgttggcggatttaacggggcaaaagcaagagaggttctcatcagtgaccttcattctttggaacagtttttggaagatctgcgcagttaaagagaaatttcagtttaacttttaacattaaagaaagtctaaagattaaagaatttaataaaaatgaaaaatattatttcaaaagttatagtaagcagtttggtagttggagcggtcggatttacaaatgcacagaagattgacgcaaaggcaaaaaaaattcttgatgatgttacggctaattataactctaaaaaaaattcgtatttcaagttttctttcggaagcggaaccaacggaaaagtagataaatcggaacccggaatttattatgctgcgggagataaatacaaactgaagatcatggaaacggagcagatcttcgacggaagtaaaatctacaacatcaacacagaagatatggaagttacggtagcgaaacctaacggaagcagttccatgttctcccctatcaattacctttctacctacagaaaagattataatgtaacatacggaggaaagaaaaatgtagatggcgtaaatgcggatttcattaaattaactccggtaaaatccaacggaataaaatacgtttatctttttgtagattctgcaaaaaaacagatggtaaaactggaacagcacggaaacaataaagaccttgccgtaattgcgattaaagagtacaaggaaaaccagacgctggatccgggaatgtttacatttgataaaaacaaatacaaaaattacctgatcacggaactttaaaaataatcagcaggtaagcggatacgcggatttgcttttaattaaacttgtctaaacttttttaacgcaaaagatgcaaaagattgtaacactttagttattaagtttaatacttaaatgtaaaaagagcacataagttaaaaaaatcaaagatttttctctttgcagacttttgaaatactttaaataaactcaacaaagtcttttgtctcttttgcggttacatttaaaattagtttaaacaaacttattataaaaatttcataaaatataagagctgcaaagaaaactttgtggctttttgtttaattttggcgaatgttaaaaatactagaccgatatattataaaaaccttcttcggaccgtttttctttatattcagcgtattgtttttcatctttattgtgaacattatctggattcagctgggtcagtttatgggaaaaggactgagctactggcaaatcatgaaacttcttttttacctcggggtaagtgtaatcagtatggttttaccgctcacgattcttcttgcgagcattatgtctttcggagaatttggggaacggtacgagcttgccgccatgaaagccgcaggaatttcgctcaccagagtgatgatgccgcttttgggagtaaccgttatactttccatcatgctgtattttttctccaataatattattccggattttcagaggaaggcgaaaaatatgcttttcaatattgcgcagaccaaacctgccctgaattttacaccaggacagtttatcgatcagattcccggaaacatggtgaagttcgataaaatttatggtaaaaatgatgaaaatatagaaggtgtttttgttcataaaaaagcaagttcttatgaaaatcagcagactgtaattgctcagaaaggtgtttttgctccggcagaaaatacaaattatttaaaacttaaattgtttaacggatttgtttacgaagacaattttgccggaaaaggagaaaacatccgtctgaaacagccagatcaggtaattaaattcgatacgttaacgcttcacttcgacgtaagtgagatcattaacaaagctattgaagaggaaaaaattacagacgattaccgttttcagacctttaatgaactgaatacaacgattgataaaacgaaaaaagacaatcagaaattcttcaccaatgtaagcagcgatgttttgggacagaccaattctgtggtaagttatatggacaccaaacagaacagcgcaaaggcaaaaccgaagcagattattaagcttgatacagtgaaaggggataaaaaactggagatcatcaataatgcttataaccgtcttgataacctgaaaagtacgcttgaaggaaaaaataacgagattgatcccggcgtaaaatattacagcaaagtggtgatttatcagcagagaattgtgacctattctttcacctgcatcattttctttctgatcggtgcgagtttgggttccattatccgaaaaggaggaatgggacttcctgtggtaattgcgattgttattttcattattttctacgtgattaatgtaggctttgaaaacatggcgtggtccggaaagatcaatccttatcttgcagcatgggttccgaatctggtattgtttcctttcggagtatggatgacgtacaaagctcttacggattctcaactgtttgatgccgagaaatacaaagcggctttcaagcctgttatcaaactttttgtaaagaatgaagaacacaaaaggtatcaataataagctataccttatacaatataaaagatccggaattttctccggatttttttgtggtatgttaaaaaatgaatttcaatttcatttcagctataaaaaattatctttgtcaaaaattataacagttttatatgagaaaattattattgattggcttattcagtatcgtttctttcaatgcgtatgcgcaggaagacaatacggaatacgaaatgagaatcggggaaaagccgggatacattattgataaaagcgggaaaaagatcgaaggtattgtaagacttgccggagacgaaatgaatccgtggacgaatcagaaaaaagtgaaattcattgcgacttcggacgttgacaactcaaagaaaaagcaaaagttcaaaacgtatgatgttgatgatcttaaaggttatatggcgatcgacaacaatacggaaagagttttcgagaccataaaatacaccaatacgaaagaagcgtacaatacgcaaaatggaggtttaagcggtggtctgaaagctttcaacaaccttacaaaaagcaaccagttcgcaaaagttgtgacagacggaaaaataaaagtgtacaaagtgtatggtttcccaactactttctcagcaggcggacaaattgcagttgcagacgaggaaaacaaaagaatgagagaaaatccggcgtatgtttattctaaaaaaggcggaaaaccggaagaactgaatgttgcaaaagcaaagattattaccgcagactgtcctgttgtaaaagctaaaataacaaaaggagaatacggttctttgaaaaatgacaccaaaaagagatcaggtttaggaaaattcatccgaaatgaaatcgacaacgcgatggcagataatctttcgatcgtaaatgaagtgatctatgattataacgaaaattgtaaataatcaattaaaatattttttacggcagtttcaatttggagctgctttttttatttgcaagtttttttaaacttttttataaataaaaatattctttttggaaagcgcaaagatgcaagatttttattcgcctcaaattttttaggcgcaagaaaatcaaagattttcaataaggatgatgcttaattttattttagataaaaatattcgtgcctttgcaatggttacagtgattaagtttaaataagttttgcgcatgttttttgcagtacgattatcaaaattatttttatgaaaatacttctttttactttaagttttcttgccattgtttcctgtaaaaaagaaaatgccgaaaactttcaaaataattcagtgactgataatacaactacaatgacagtttcggaaaaatcgaatgataccattacctccattgaagatattaaaaaagaatatgcaacagtaaacaatcttttgtctgcgaaacagttggattcaacgaaattcacctataactgcgacgaaaaagaaggtgaagttgttttgtattatgaaaacaaagatctcagaatggttaaagattcttatgcagaacacagtcacttctcttcatccacaaaatattatgtaaaaaacaacagcgtatttttcatttttaaagaagaaacagaatggaattttgatgaaggcggaacgcccgaaaaacccgaaacaaaagatgatatcaatgaaaaaagaatctatgttttaaatgataaagccattcagtgcctcgaaaaaaattatacgattcgctcaaaagggaataaccggaatcctgattcaattccgaataaagaaacaaagtgcgacgtttccgagctgatgaaaaactatcatttaatccttaaaaataaagacagaaaaggagaaatcaattgcctttaaactgtacacaaaacaaaagcggcttcaaaatgaaaccgctttttatattttcaggagccgaaaattatactttcataatttcagcttcttttactttaagatgctcgtcgcaagcttttacatatttgtcggtaagcgtctgaatatctgcttcaatacctttaatgatgtcttcagaaactccttccagtcttttaagctctttcagaccgttttgtcttgcgtttcttacaactactttcgtgtcttctgtttcagacttagcctgttttgccagttcacgtcttctttcttccgttaaaggcggtacattaaggataatgttgatcccgttattagaaggggcaaaacctaaattggaattgatgatcgctttttcaatatcattaatcgcttttgagtcccaaggttgaatagaaatcgtcattgcatcgggaatagaaacattggcaacctgattaattggagttaatgctccgtaatattccaccatcacatcctgaaccattgttgtagacgcacgtcccgctctgattctctgaaatgcatgatccaggtgcttaatagctgcttccatgtcctgctgtacagactctactataagatctaattcttccattactataataaaatttgataagttacacatatgttaatgataagtaataaataattggtaatgagtaattttttaaactttaaactcaaaaccctgaacttactattacaaatcaactaaagtaccaacattttcgccatcaacaattttttccagatttccgtctttgttcatatcaaaaacaataatcggcagtttgttttcgtggcttaaagtaaatgccgtcatatccattacctttagattcttcgcataaacttcgtcgaaagatagtgaattatattttaccgcatctgcatttttttcaggatcgctgtcgtagattccgtctactcttgttcctttcaaaataacatctgcgccgatttctatggctcttaacgttgcggcagtatctgttgtgaaatatggatttcctgttccggctccgaagatcactactcttcccttttcaagatgtcttactgctcttcttttgatgaatggttctgctactttatccatttcgatggcagactgcagtcttgttttaattcccgcatcttccagagcaccctgcagagccatcccgttgattaccgtagcaagcattcccatataatctccctgtactctgtccattccttttgcagctcctgctacaccgcggaaaatatttcctcctccgattacgatggcaacttcacagcctttttctaccactttcttaatttctgcagcatattcctgtagcctttcattatcaataccatattgtctgtttcccattaaggcttcaccactcagtttcagaaggattcttttatatttcattgtatgtaaataactttttttcgttagatatatctgtctaaaatttgactttgcaaatataatcattaataaggttgatttttcattatacattataaattttaaaagtgatgttttatgggatcaacaaagcatttttccttataaataatgcccctgtgttttataatttgagtgaaaacatggctgtttaattaaattacaaaacatgaagattcaaaatactaatcttacgctaaaagattaagctcaatgaaaatggcatagaacttaaaataaaaccatgattttcacaaaacttaaatatttaaatataaataatgtgagaaatattttgaaaagtacgaaaaaggattatttttgcattactaataaactgagttgaagaaaattgtcattttttcattatttctgtcaggaattgtttcttatgcacaaacaggaacaaacgtttatccattcttaaatatccctgtttcagcgagacaggcagctttgggaggagatgcaatttctgtgagagatcgtgatgtttcctttgctattgcaaacccctcattactgaataaagattccgacaaccaactgtctgtaaacgcaactgcttatcttgcagattccaaatacggaacgatagcctatgcaaaagactttgataacggtcacatggcgaccatcaatgcaagatacatgagctacggagatattccgcgaacagacgacagcggtttcgagaacggaactttcaaagcctcggatgttgccatcggagcaggatatgcctatcagtttgaagaagactggacgattggaggaggattgaatttcattacttcgaaaatcgacacctatacttcttctgccatttcaggaaatgcaggaattacgtaccacaacaaaaaaaataaggaaacagcatctgttgttttcagaaatttcggatatcagttcaattctttcaacggaactagggaaaaccttccgtttcgtgtagatttgggatatacaagaattttaaaagtaattcctttagcggttaccattacagcacacgatttacaggaatttaatatttcttcccagtacaatataaacgggcaggaagtaaatacaggcagaaaaatcgccgatcatttttctataggcgcagaactgtttccggaaaaaggcttcaacatcagattggggtataacgtaaaaagaggaaatgaattagccgttgcagaccagagaaatttctcaggactttcggcaggattcgggattaaaatctccagattccgtgtagattacgcacacgtaagatatcataattcttcgaatgtcaaccagataggagtttctatcgatcttacaagtcacgcaggatactaattgttaatcatttttcaaaacgaaataaatatcggaaacctcaagaaaatcgcttgaggtttcttgatttttaagaaaaaatcttgaaatttgcagtatgaaaaaacctgtaatagctatcgacgggtactcgtctaccggaaaaagttcaatttctaaagtcattgcagcaaagctgggacttattcatctggatacaggtgcgctttacagaggagtaacatggtttgctcttcagaattgtttaaatgacaccggaaccattgatcttgagaaattattttcttcgtttgatcagatcgggcttgaatttaaaaatcttgatggagaactggttcttttcctgaatcatattgatatttccaaagcaatacgtacgaatgaagtctcggagaatgtaagttttgttgccaaacagaaagaagtaagagattttctgcttcagtctcagcgcaatttggcagaaaaaggcggcattattatggacggacgtgacatcgggacagtagttctgccaaatgcggaatataaattttttcttaccgcaagtatcgacgaaagaaccagaagacgttatcaggaactgatttctttaggaattgaagcagacgaaaagcaggtaaaagaaaaccttatagaacgcgacagaatagacagcgaacgcgaaatcgccccgttaaagcaggctgaagatgccattgttattgataataccaatatttctaagaaagaaactattgatgagattttatctcacatccaaaagatttaacattttttaatagatgtctttctcctttggtatgttaattgtacatttcatcataagtaaaaagctaatattattaactattaaaaaaaacgaaaatgtctaaaaaaaacaatacagcgggtattttggcaggacttcttgcaggtgctgcggcgggtgttatcttaggaatgctttatgctcctgaagaaggtaaagaaacaagaaagaaaattaaaacaaaagcgaacgatcttaaagatcaggctaaaaataaatacggagaagtttctgaaaaagtaaaagaccagtatggtaacatctcttctactttcaaggaaacagcaaacagtgttgcaaataccgtaaaagacggatatgataaatacaaagatcagatcgtttctaaaactgcagatgtagtaaaaaatgtagaatctgaactgaatgatctaaaataataatatagtttatttttttaggtaaattatgagaaggaactttataaacgaaagttcctttttttgtaactttaaagaaaaacaatgattgaaactattaaagaatacgcttcaaaaaggatcgatctcctgaaaattgaagctaccgaaaaatcctctctttcggcaggaatgatcacctattttgtggttttgctggtcgcttttggttttttcatcattctgttcaacttcggaattgcctttcttatcggtaaagcattgggagaccagtcttacggattccttattgtagccgcattctatcttttaaccatgattcttatcgtgctgtttaaaaagaaaatcgtaaattatgtggcagatcaggtaattaaatttttaaatcattaaactatgagcagaaaatatgaaagcttagaggaactgagaagaaagaaaaagctgctgaagcaggaaatagacggtctggaagacctccttaccttcaaaaataccaaagaaagccttagtgcttttaccaatggcttaacagaccagtaccttcaggaaaaaatagatgaagacggcgacgaaaaggtagttctaagaaaagatgttatcgccaaacagattacttcggaaattaaaggagccttaatcaataaaaatacagcaatgggaattgcaaattccgcatttaaaggagatgcggcggatattatgataaaccttgcagttacaacatttgtcggaaattatgccagaaaaaactttaaaagttcaaactggaagaataaattaattggcgctgcaatgatctatctcgctcctgtcgccttaagatatgtaagaaagaaacttgaaacgtatcagaaaaacaaaagcgtttcgagtatggaacagcttatctaaagtttgagggttttagagttggagtgttcaagagttaatctcattacgctcccattctaaaaccctttaatatttgattaaacctcaagatctgtctattgatctttttcacacaaaccctccaattctctcactctattactctctcactcacttcctccaaacaactgtcctaaaataatccctgctgccattgaaacattaagactttctgtagactgcgattttccgaatcttgggatcatcacacttttatgaagtagtttttccgtttccggacgcatcccgttgccttcatttcctaaaattaaattcattttctcaggtctttcgaaagaataaatattttcaccatccatatcggttccgatgttgatattttctgtttcggataaatattcagtcaggtttgtataaacgatatttaccctcgtaaaagatcccatacttgccataataactttaggattatagaaatctacagtatcttcactgcagataatctgctcgataccgaaccagtctgcaagacggattatcgttcccagatttccgggatcctgaattccatccaaaaccaactgaagatttttatcctctgttttttcctcaggatgaagataacagaccgccacagaatctttcggattttgcagaaaactgatttttttcaactcattttcagagatatgagttaccggagcttccatacggtctaatttttgcggatccgtagaaaatatttctttaattttaaatctggaatcaggaagttcacgaatgattttattaccttcaaccaaaaacaaattgtatttttgcctgaacttctttttatctaaagactgtaaaatttttattgtatgagctgtaagcattataagaattctcctcaaaagtattataaaattatatcatttgcaacatttgtaggtctcctttatgcttgtagtaccactaaaaaagttccggacggcgaatatttgctggtaaaaaacaattttcagtttgaagataagaaagaacctttcgatggcgaactgaaagattacgtacagcaaaagcccaataaaagacagcttcttttcatgcctttaagcctttggctttacaatgctgccaatcccaaatacgacacgcttcttaacgagtacatgacgtaccctaatgaactgagaaatcaaaaactgagagattctcttttcattaaatacaacatgaaaaacagtgtgggtaaaagtctgtttttcgacaggttataccacaactggggttccgcaccggtgattctcgaccagacaaaaacttcaaaaagtgctgaatctatccaaaaaagaatgacgtatcgcggctattgggatgcagaggtgaaatttaagcatgaacttgattccgctgcaaaaaaagctgccgttaattattttattacccacaatcagcctacttatattaaggattattattacaacatatcagatccaaatatcaaaagcctttatcagcagaaaatccgtgaaactcttataaagaaaggacagattttggatcagaccgttttggagaaagaagttggaaggattaatgatcttatgagggagtatggatattaccgttttaatagtttaggcgatgaggtaggttttgtggcagattctctaaaaagcacaaaacaggttccgttggttctggagatccgtaaagattctttagacagtccttacaaacaggcaaccatcggaaatattgatgttgctattgtagacgaggcaaaagattttccgaataacacgaaaaaagacagcttaagaggaattcgttttcataaaacagacaacagctacgattcccgtgcgatctggagagccattatcgtaggaaacaaacaggtatacgatcagaaaaagctcgatcttaccaaaagaaatattctggcaatgaataatttcagcattctgaaagccagagattctttaagaagaggcggcggtacaagcccgaatgacagtattgtagatgtaacgtacgttttgaaaccgcttccaaaatatgatttaaaagttggaacagatttaaattattccgaagtccttaatttcggggtttctccttccatcgatcttaccacgagaaatatttttggcggggcggaaaaccttacaaccagtctttccggaactttcgggcgaatcgtaaatcctaaaaatatcgataacaggatctgggcttacgaaatctcggcgcaggcttcattgaattttcccagattgcttttgccttttgattattacaaattaattccgaagagatacagccctacttcctctattactctcggtgtttcagatcagagtaacataggtttgggaagacttaactttaataccggtctgaattatctggcaacggtaaatgataaagtaacgcacagacttaccttatttaatacgcaactgagtttaacgaagaacaaagatgcgtattatgattatttcgttaatgataatgctatccgtgaagagtttttcgcagattatttcgcttacaactcatcggtatatcaggattttaaagcaggattactgacgattgatcaggtttcgcagcgcattattgaagacacgacctatcttcagggattaaatcagcagggagttgaccggtttgtagcttttgtgggaactttggtgaataaagaccgacagactcaggatgttttgatttcttctttcatttataattttatttacaatgagatagggaaaaaagattatccaaatgctttttattttaacggaaaagtagaactggcaggaaatatctttagtatttttaatcagaaaagaaatgacggaggtgttgttaccagtccggaaagaaccattttcaatattccttatgcgcagtttgtgaaatttgatcttgattttagaaaatattttaaattcggaaacaatactttagcgcttcgtcagtttatcggagtcggaattccgtacggaaactcttccaatatgcccgtcatccgttcttatttcaacggtggaccgaatgacatcagagcatgggttcctttcggaggattgggtcctgccgattctcaggtagatgaaagagttcgaacgtatatgactgataatttaaaactgaccacaaatatcgaattcaggatgccatttaatgatatgtatgaaggtgctattttcacggatatcggtaacatctggagtcttaaaaattataacaacggatacggagatgagtttaaattcaataaattcatcagacaggtaggtgtaggaagcggttttggattaagggtaaatattgcttacatcaaactcagactggatcttgcctacaaaatgtacgaacccaacaaacccgaaggtgaccgatggagactgaaatacattcaaccgtttaagccaacattaaacatcgcattcggatatcctttctaaaaattttacaggtggtatttctcacaaatgccacctttttttaatccggcgaaattcccaaagcgaaatagaccaccgcgaccgttcttgcaagaatttctctgaactgatttctgtaataactttcgggcttggtaacatcctgtgcatcaaaacccaacgcattcatattgttgtttctggcaaataataaagcgcgaagattatgaaatccctgagaaacaataattacattgtcttttctatacacatctttacagcggagaatactttgataggtattaaaacctttcggatcttccataataatttcctccggaactccttcctgataaataagatagtttttcatggcagcaggctcatcatatcctttgctcttttcaccgcttacaagaattttccggattttcccgtgatgataaagtaaggctgccgcatccattcttttcgtaaaataaggattggacacgccggatctcattttgggtgaagttcccaaaaccagagctacttcccttggaggaatttttgaaattttggtataggttcttccgtctgtaagcgcaaaaacccacgcattggcgagacatatcaacagaattcccatttctattgatatgaatatcaggttaaatatgttttttattattctcaactaaggtcaaagttaagctttatttttttgcttttagcaatcgacatacaagccaaaatatgtcctctctcctcttcatttaccgttaaatattcattttcaagcaattccacttctccttcttccagaatacattcacagcttccgcaaattcccgatttgcaggaatacggaacctgaaatttctgtacaagtaactgctgcaaaattctttcctcgttggtcggaagtacggtagtatattcttttccaagcattttaaaagccagttcaacgttttctaataacggaaattctttttctacaggataaatatcgtcattaaattcttcaaaaagctcaaaatgaatattttttttcggaattccgtgatgatagcaagcattggcaagagttttaatcatctctcctttaccgcagatcagcacttcatctacggcatcccaaatggtagattcttcatccgtatcatccagatgaaggatttggttgatgatgagacttaattttttatcatccagtcttccatggaaaaaactattggcggttttctctctggagaaaaaataaaaaatctgcaaccggtctccgtacattttagcgagccgatcaagttcatctctgtaaataagatcttcagaacttttatttccaaaaaataaaaatagcctggttctcggttcattatgcagaatatttttaaaatgacttaaaatcggggtaattcctattcccgccgcaaatcctacaatggttctgaattcgctgggttttgaaattaaagtaaatcttccgctcggttcgcttaccaataactcatcaccttcatgataattttcaaataactgtgaagaggctccgtcaggagaattaaccttaatccctaacgatattttatcctcataaggagcagaagtcatcgaataatcattgatgatttccttaccgtgagcgtgaaattgtatgctgacaaactgaccggcatcaaacctgaaattttctttcagattctccggaatctcgaattccagagaaaaagtatttttggtcagttcttcctttttcgctatttttaaccaatgaaactgtgtaagtttccctttatagatttgttgttccataacttcaactcaaaaatagataaaaaataatttatgaagaagataattttatccacgcttgtagttttttcattggcaagctgtaaaaaggaaaatcaacaaagtgaagaaacttccacggttacggattctgttgcagtttctgaaccaaaagtctctcaatctgctttaaagacatttacaaatgagcaggcaactgaatttttaggcaaaaaaaatgacacgctgtatgtcacgaatttttttgcaacatggtgcggtccatgtgtaaaggaaattcctcactttaaaagtaagattgaagagcttaaaggcaaacctgtaaaaatcacttttattagtctggatagtaaagaagagtggaatacaaaagttccgcagtttgtacaagaacagggaattgaaaaaaacacaattcttttggacggtgcttcgcttgacgctaatttttttacttctaattttaaagagtggacaggaaatgcaattccgtttacattcatgagaaaaggggataaaactgatgaaactttagggatgatcagtgaagagcaacttaaccaaaaaatcaattctttattaaaataaacttcagacgttttatgtcagacaagtttaaaatcctgtgtttcgttttattaatcgccattattttggcagcggttattaatctgaatataggatttttaagtttacattttcaggacttttggggagaatcttccaacagccagattgcggaaatacgcgtgaaccgtgttttggtaatgcttttggcaggaatttcgatccccacttccggttttctcatgcaggaatattttcagaatcctcttgccggaccggatatcttaggaattacttccattgccagtttatctgtcgcattttacatctttttttcgcacgatcttctcatcccggaatttcttcagaacagttttttaagctttgcagccatcggcggaagtcttttactaatgctgattcttctttccatttccaaaaaatttcaggataaatcgtacctcattatctttgggtttctggtttcggcttttgcaggagccattgtttctctgttgcagttttatggagaagatcagagtcttaaaaactatattttatggtctttcggagcgaataatatggtttcaagaaatcagatttatgttttatctgttttaataataatcggactatttgtttgctttaaaaccataaaaccattgattggaaattcattgggaacttcatacgcacaaagtctgggagttaatctcaatcaacttaaactgtttattattgctgcctcttcccttctttccgcttctgtcaccgcttttttaggtcccattttatttatcggaatcattgttccgcatttcagcagactgatttataatccggcaaagctttggcagcaatggattttaaacatgatgctgggaatgttgatgatgctttttttctccatcatcgcagaaaaaacacagattcctataaatgtaataagctccgttttcggaattcccgtaattttactgatgcttttgaagcagaataagatttaatattgttggtttttcacaaaggcgcaaagttatttttataattttacgtttaaggcgcaaggattttatctttgataaaatttaggatctcaaaattattacaaaattagtgcagtacaacacttgctgaaaatctttgattttcttgcacctttgcgaaaaaccaacacaggataaaataaaaacacaacacaaatgacagaaaacgaattatcaaaaattgtctttgagacaggattaaaaattcataaaaagctcggagccggattatttgagcatgtttatgaagaatgtttattctacgaacttaaaaaagccggactttttgtagaaaaacagaagttacttccaatcgtttatgaagaattaaaaattgaaaatgccttcagattagatatgattgtcgaaaacaaattaattttagagataaaaactgttgattatattaactcaacgcataaagcacaacttctaacttatctcaaaatgacgaattgtaaattaggactgcttttaaactttcaatctggtatttttaaaaacggggtgacaagaattatcaactttttataaataaacacaataaaaatttgacaaagtcaaattccctgcgtcttaaaaacagtatttttgcaaaaaaaactttgcgccttagcgaaaatccaaccataatgcacctacaaataaaacaagcaaacattggctatcataaaaccttaatttcaaatgcaacagctcatctgaaattaggcgaagtctgccttttgattggaaataatggtgtcgggaaaacaaccttaatcaaatctattttacatcagatccctgttttaagcggtgaaattttcatcaataacaggaatgtgaaaaatctttccgtaaaagagattgcagaacagattgccatcgttttctccagttcggtaattccgcagaattatactgttgaagatctaatttcgttggggaaatacatttattatcctttttattttgagctgaaaaaagaagacagagaagaagttgcacatattattcaagaactcgatcttgagcagtacaaaaacacgctgcttaaaaatctgtcggacggaaatcttcagaaagcatttatcggaagagccattacacagaacgctcccatcattattctggatgaacccacgactcatctggatgaaaaaaataaaattatcattctcaaaacactccggaaattagcaaaagaacagaataaattaatccttttttcatctcacgactggcgtcttgccaaggaatttgcagacaaaatctggtatgtaaaagatgctgatttgttttccggaatcgtagaagatgtcctgcttcagcatgatgaattgatcaatccttcattgtttcagatcaatgaaaaatttgtggcacctaaaatcatcgcttcggacgcttataaagaaatgctgtattctttgctgcaaaaaaactttcaaaaagatctttcttctctgaaatttgagtttcaggacaatttttggcacatcaatgagggtttacaaaaattcaaatgcgaatcttttgaagaaatcgttaatttagtgaaaaccattcattaataccgcgttttccttatataaacaatatactatgcatgcatagtattatgcttgtcatataatttaactttctgatttccatttatttaacaaaatttaacgtaaataaatattatgcatgcataatatttactaaatttggattataaccattcggataaaatgatggataacaataaagaaaaaatagaaaacgtagatcttattttaaaacagacatggttagctgtttctaaaatgtacaccgaattagctcaggagcacgattcaacggcggttcaggcgcttactcttctaaaaattgatccaaaagaaggtacaagaagtacaaatctgggtccgaaaatggcaattgaacctacttctcttacaagaattattaaactactggaagataacggatatatctataaggaaaaaacaacaaccgataaaagagaagtcattataaaacttacagataaaggtctgaactccagaaatctttccaaggaagttgtggtaaatttcaacaaaagagtgatggaaaaaatctctcctgaaaagcttgatacctttaaggaagtgatgagcgaaatcatgaaaattgcaacagacttaaataacaaaaaataaaaactcacgatgtcattctgacgaagaacgaatctattcatatcatttagaatgaccaaacaaaagaattaatacaattacaaataataaatcaaatgaaaagaagaatcaaacacgttacagttcttggttcaggaattatgggaagcggtattgcagcgcactttgccaatattggtgtagaagtttcgttgctggatattgttccttttgaactttctgaagctgaacagaaaaaaggtttgaccaaagaagacaaagcggtaagaaacagaatcgcttcggaaaactttgaaaaactcaaaaaagcaagtccggcactcctctattctccaaaatttgcagacagaataaaggttggaaactttgatgatgatttaccaaaaataaaaaatacagactggattattgaggttgtggttgaaagactggacatcaaaaaatcggtttatgagaaaattgaacagttcagaaaaccgggaacgctgatttcttccaacacctccggaattcctattcatttattaacagaaggaagaagtgaggatttcaaacattattttgcaggaacacacttctttaatcctgtaagatatcttcctcttttagagatcattccgacaaacgataccgctcctgaagttatcgacttctacatgaattacggagcaaaattcttaggaaaaacaaccgttttagcaaaagacacccctgcatttattgccaacagaatcggtgttttctctatgatggatttgcttcacaatgttcagaaattagggttaaccgtttctgaagttgataaattaacaggtccggtaattgggcgtccaaaatctgccacattcagaacagcggatgttgtaggtcttgatacattggtaatggtggcaaacggtgttcgccaaagcggtgctgaagccaatgacttcaacaatgtttttgcccttccggattacatccagaaaatggttgataacaaatggttaggttcaaaaacacagcagggtttctataaaaaagtgaaaaatgcagaaggaaaatctgaaattcacggattaaatcttgatactttagaatacgaacttcagggaaaatcttcttttgcaactttagaattaactaaaaatatcgacaaaccgattgacagatttaaagtgttaattggcggaaaagataaagcgggagaattgtacagaaaatctttgggtgcattattcgcttacgtttctcacaaagttcctgagatttccgatgaggtttacaaaatcgacgatgcgatgagagccggtttcggctgggaaaacggtccgtttgaaatctgggatgctgtaggcgttcaaaaaggtatcgaactggctaaagaagcaggttacgaagtttcagactgggtgaaaaacgttgaatctttctataaagtgaatgatgaaggacagagtatttatgtggacaaaaactcaggatcatacaataccattccgggacaggattcttttattattctggataatatcagaaaaaataaaacgctttggagcaactcaggttctgccatcgaagatttaggcgacggcattatcaactttgaaatccgttccaaaatgaactctttaggaggggaagttctggatggattaaacagagcaattgatttagctgaaaaagaatatgacggattagttgtcggaaatcagggtacgaatttctctgtaggagcgaatttagcgatgattttaatgatggctatcgagcaggactgggatgatctcaatatggcgattgcttatttccagaaatcaatgatgagagttcgttactcttctattcctgtggttgttgctcctcacggaatgacacttggtggaggttgcgaaatgacgatgcacgccgacagagtggttgcagcagcagaaacgtatatcggattggtagaaaccggagtgggtgtaattcccggcggtggaggaaccaaggaattaactttaagaacatcaagagaattccacagcgatgacgtgaaaaacaacagacttcgtgaggctttcatgaatattgcaatgggtaaagtggcaacttcggcttacgaagcctacgacatgggaattttagaacatggaaaagatattgtttccgtagataagagaacccagatcaaaactgctaaaatgctggcaaaaagcttagcagaacacggttacacacagcctatcgagcaaaaagtaaaagttttaggtaaagacgctttaggaatgttctacgtaggaacagaccagatgttaaccggaaattatatttctgaacacgataagaaaattgcagataagttagccaacgtaatggtgggcggaaatctttctgaaccaacggttgtaacggagcagtatttattgaatctcgaaagagaaacgtttttacagctttgcggggaaagaaaaacactggagagaattcagtatatgttacagaatggtaaaccgttgagaaattagatctatctgtaaaatgtagagagtattaacgtaaaaagtattttaatatgcatgattttcggcaacttgaagtttggaaaaaatcaattcaactttgcaaaacatattattttttttcaaaagaatttccaaaagacgaattatttggtcttatatctcaatccagaagatcgttatattctattccttcaaacatagctgaaggtgctggaagagatactaaagctcagttttcacattttttaaatattgctttgggttcttcttttgaatttgagactcaaatcataatcgccaaagaatgtgaattttttccggaggataaatttcaaaagactcttactgaaatacagtatatccaaaatatgattattaaactgaaaaaagtttattcaagttaaaacttaaatacattgtacatcatacaataatacattatacaatttatgaaaacagcatatatagtaaagggtttcagaactgccgttggaaaagctccaaaaggaagtttaagattcacaagacccgatgtcatggcggcaaccgtaattgaaaaattaatggctgaacttccgcaattagacaaaaacagaatcgatgaccttatcgtaggaaatgcgatgccggaagctgaacagggcttgaatgtggcacgtcttatctctttgatgggcttaaatacagacaaagttcccggagttaccgtaaacagatactgtgcatcaggaagtgaggcgattgcgattgcttctgcaaaaattcaggcaggaatggcagactgcattattgcaggaggtacggaatcgatgtcttacattccgatgggtggttacaaaccggttcctgaaactcagattgccaaaacaaaccctgattattattggggaatgggttacacggcggaagaagttgccaaacaatataaaattacaagagaagaacaggatcagtttgcgtttgaatctcacatgaaagctttaaaagcaaatcaggaaggaaaatttaaaaatcagattgttccgattcctgttgaatataatttcttagacgaaaaccagaaaatgcagactaaaaagtttgatttctctgttgatgaaggtccgagagcagatacatctttagaaggtcttgcgaaattaagacctgtttttgccaacggaggaagtgtaactgccggaaactcatcccagatgagtgatggagcagctttcgtaatggtcatgagcgaagaaatggtaaaagaattgggacttgaacctgaagcaagattggttgcttatgccgcagcaggattggaaccaagaatcatgggaatgggaccaatttatgcaatcccgaaagctttaaaacaggcaggtctggaattaaaagatattgagcttatcgaactgaacgaagcatttgcctctcaatcagtagcaatcaaaaaggaattaggcttaaatccggacattttaaatgtaaacggaggtgcgattgctttaggtcaccctcttggatgtaccggaacaaaattaactgttcagcttcttgacgaaatgagaaaacgcggaaataaatatggtttggtttcaatgtgcgttggaacaggacagggagcagcttcaatctttgaacttctttaattaattatagattttaaattataaattttagatgaaatgagttttaaggaagacaatttgattcagattaaaacatttgaatttgcattgaaaattatcaagttttatatcgattgcaaagctcagaatgaatttattttatcaaaacaaattcttcattgcggaacttcaattggagccaatgttgaagaaggaatcgcagctcaatctaaaaaagactttatttccaaactttcaattgcaaacaaagaagcccgggaaactagatattggctgagactttaccagtcttcaaatttagtacaaatcgaaattgattcctatttaaaagaaattgaaagtattatcaatattttaacgaagattattaaaacttcatctgaaaatttataactgaaatctaatttaaaatttataatctaaaatttaaaataaacaacaatgagcaatatagtaaaaggaggagaattcttaattaaagaaattcctgcaaacgaaattttcagtcttgaagaactgaatgaagaacaaaaaatgcttcgcgattctgcgaaagaatttatagaccgagaagtagttccgcaaaaagaacgtttcgagaaaaaagattatgcatttaccgaagaagtaatgcgtaagcttggagaaatgggactattgggaattgccgttcctgagaattacggaggtcttggaatgggattcgtaacaaccatgcttgcctgcgattacatttccggagttacaggttcattggcaacagcttacggagcacataccggaatcggaacacttcccatcgttctttacggaacagaagctcagaaacaaaaatatcttccggatttagcagcgggaacaaaattcggtgcttattgtttgaccgaaccggatgccggttctgatgccaattcagggaaaacaagagcaaaattgtctgaggacggaaaacattatatcatcaacggacaaaaaatgtggatttccaatgcaggattcgccgatacttttactttgtttgccaaaattgatgatgataaaaacatcacaggtttcgtaatcaaccgttcagaattagaaaatcctgagagtcttacttttggtgaagaagaacacaaactgggtattcgtgcctcttctacccgtcaggttttctttaatgatatgaaagttcctgtagaaaatcttttaggagaaagaaacaacggattcaagatcgctttaaacgcgctgaacgttgggcgtatcaaattagcggcggcttgtctggatgcacagagaagaattttaaaccactctattcaatattctaacgagagaaaacaattcggggtttctatttcgactttcggagcgatcagaaagaaactggctgaaatggcaaccggagttttcgtaagtgaagcaggatcttacagagcagcaaaaaatattgaagataaaatcgaagaacttgttgcaggaggtctggatcatcaggctgcagaactgaaaggagttgaagaatttgcagttgaatgttcaattcttaaagttttcgtttcagatttatctcagcattcagcagatgaaggaattcaggtgtacggaggaatgggattctctgaagatactccaatggaagcagcctggagagattcaagaatttcaagaatttatgaaggaaccaatgaaatcaacagattattagcggttggaatgctcatcaagaaagcgatgaaaggagaattagacctattatctccggcaatggcgatcagcaaagaactgatgggaattccttcattcgaagttccggattattcagctttcatgagcgaagaaaaagcaattatagcgaatcttaaaaaagtattcttaatggtttccggagcagcgcttcagaaatacatgatggatattgaaaaacaacagcatttattgttaaacgcttccgaaattcttaatcagatctatatggcagaatctgcagttttaagagtagaaaaacacttctctcctgattctgtggaagcagcaatgactcagttaaacctttataaagcagttgaaaaaatcatcgttgcagcaaaagaaggaattgtttcttttgcagaaggtgacgagcagagaatgatgctttccggattaagaagattcacgaagtataccaatcatcctaatgtggttgcactaacagaaaaagtggcagctcattttattgagaaaggacactattaaaaatagtttgaatataatagaaaatcccgaaattactttcgggatttttttattaaaattgtttttgtccaatttcgtttatttcgttatagtttcctttaggatcatctccatattgatttctaccttgtgttccttcagtcgcatacaacactaaaagccatattcccccgataattggaattaaagaaataaacaggaaccacccgcttttatccacatcatgcagtgtccttacagaaacagccaaccccggaagaaaagttaccagtgcatacaataaataaaggtatccataaggaatttcaggtgtaaatttcaacccaagaatattatctaataccgcagcaataactgcaaaaatcagattaaataaaagatacatccaatattcagttcttcttgctcttccgttaaaatcagcgtactgttttaatacttttaagtaccatttcatagttataattttttttgttgttttcaaaagtaatgatttttatctttcataatatttcttttcaactttttaatttttcagttaaaatttttcagatgtaataaaaaagaaaattcaattgtctttgaaatattacatttaacctttttttaaattcaattattttttatacttttaacgtaaatacaaaaaatgagaataacattattagccattctgctgttttcagcttcactttcagcacagcaaaaaatcagaaaacctttaattccgaaaacagattctgtcgggatttataaaatggattccaagacaattcaaccgccgcagaaatcggatcaaagaaacttgtataaaatgccttctgcaaaaccgaaagaagggacagcgtattctggtcttaaaaacaacaaaacagatcatcacgattataaaatgctgaattctattgctccggaagcaccaaaaaaagaggagaaagagcttccttcaacatccaaataaacaaattttaaaaaattattatacacatgggaaaatttattatttctacaagaaaaaacggtgagtttcaatttaatttaaaggcggcaaacggacaggtaattctttccagcgaaggttacagttctaaagcaggatgccagaatggtattgaatcggtaagaaaaaatgctcaggacgattctaaatttgaaagacttaccgcaaaagacggacgttcctattttaatctgaaagctaccaacgggcagattatcggaagcagccagatgtatgaatctgacaacggtatggaaaaaggcattgaatctgtaaaaaacaatgcgccaaacgcctccgtggaagaagaactcgattaaaaaagatatcctaaaataatttttgtaaaatgtctcatagttttgaggcattttttatttttgtaatctactttacaaaaaatgacaaaagaagaaatgctccaccgggcaataaaaatagccgataaggcacataaaggacaaaccgataaatatcacgctccatacattgcacacgttatgcgggtaatggaatacggaaaaacaatggacgaaaaaattgtaggcgttttacacgatgttgttgaagatcatcctcaggaattcagccttgattatttaagagatcagggatttccggagtatattatttttgcgataagctgtctcacaaaatttgatcctgatgaagattatgatgatttcgtaagaagaaccgaacgttctcctcttgcggttgccgtaaaattaaacgatctgcgcgataacatggatctgagaagggtaaaccgggaacttactccaaaagacattaagagattcaataaatacctgaaagcctatcattatctgattgaaaaatattaaaagaaaacagccttccttcaatgacattaatttaacgtgaattcggagaaaaacatgaggtgcttaatgtctaaaattaatattttagaattgaacaaatactaaaacacctcatgaaaaacaaagatatgctttttgacgaaaatctattgannnnnnnnnnnnnnnnnnnnnnnnnnnnnnnnnnnnnnnnnnnnnnnnnnnnnnnnnnnnnnnnnnnnnnnnnnnnnnnnnnnnnnnnnnnnnnnnnnnngctgctgtattaacatctgctttactcttaaatgcagtgttaatatacaaagaaggagcgtaaaactatacgttttacactccttttttattggttaataaaaatttagtttttcagtgacctcacgtaaattcggagctttttatataagttttattactcagattagaatttccatccaagtgtaataaagaaattgtttcttacgtttttaacatccgacaccgcaaaagcatcacttgaaattaaacggcttggcgaataatatcctgcttcgtaattaccatcagcaacaccgtacaaaaacggattggtatattttgaagtgatgttctgataagaagcatcaatgtagaatgatttgaaatcgtacccaagaccgaaagataaagcatttctatcgttaaggatcaggttgctgtacgactggttttcatccacacctccattgttggaatatctgtttatcgttaaagcatcaaaagggcttgaagcataagaataccctcctctcagtctgaactgtttaactctgtattccgcaccgatctttacttctgataaatttttgtaattctctttaaagaagtcgttcagctccgtttcagcatctccgtaaactttatatttaggctttgttaaacctaatgtataatctacattcaaagcaaaacttttactagcaataaatgcagcacttactgttgtctttaaaggagtggttaattttctgttttcaatagcagtatcatctccataaataggatcattgtagaaattgtagcttctgtcgatatcccagaaagtcggagtttctaaagctgctcccaatctgaaattaggacttaattttccaattacccccaatgaagctgaaaaaccgtttcctttttcgtagaaaggagtattctgtttgctgaaatactcagaacttccgtcagccagagaattaaacattgctgtatccgactgatctattgaagaattaaagaaatttaatcctgctcctaaatataaattattattatagttagctcctactccaatgcttgttttagataaatatccgtatctgtcataggcatgtcttccaaatgaagaactttttccatcaggaaaatcatatactaaattactgtttcccggagtttcaatataattctcaattgactggttagaatagttcaccccgatattgatgaatttccatgcactttcacttaacaactgaaacgtcattacagctcctaagtttccaagatcacctttattgatgctgtatccgtaagaagaacctgcataagtagaagtattcttattatttgtaatagataatgttccggaaatttcccccgaaattgccacccctaaccccgcaggattggtaagcagcgaattcgcatcacctcctaaagcaccattggaacctcccatcgcattaaacttagcggaaccaatatttggagcattagaataaacatccaccgtatttctaatcacagaaacatcttgagcctgcgcaaaaaatgcagcagaaatgctcattattgctaaagatttttttaacattattttttgaatagttattactttttaaaattatctgccaccacggaaaccgcctccgccgccaccgccggatctgaatccaccgccgccgctgcttcctccgctaaagccaccgcctcctgatctgaagccgccaccgctgttggaattgttaaaacctccgttatttctgaagcctccgtcattatatcttggctgagattgttgtgggtaattgtagctttgtctaggctggctctgatttggatttctaaagcctccctgaggtcttgttccgctctggtttggatttctgaaacctccattcgtatttccttgtctgaaacctcctgcgttaccagaatttctgaatcctccattatttgaacctgaatctctgaatccgcccacgctgctgttgcttcttctgaatccaccggaatttacgccatacttgctggcaaatccgccgttataagtattgaaacctcttccgttagagccacttcttctgtacattggtgcgtaatatccgccaccccaatatccgccgtagccccaataaggattaccatagtatccgccccaaccccaatatggattgtagccccagtatggagaatatccccatcccatgttccagccggagccccatccccatgagcctccccatccccaggaaagtccaagattccagccgccgtagccgccccaaccccaataaggattgtagccgccataccaaccgccccatccccatggagaaccccatccccaagagttgtcataataattagtctggcttcctgcgtagcttccccagtctgaatctgtagctgtagtattccaattataattattccagtcgttgtatcttccttctttagcattggcttcagcattttgaatcacattggaatcatcctgataataattgtaatcttctccgactctgtttcctctgtcgttgatgattacgccttcaggtagtgtatctttattcgggtcgtaataaacgccatctgtctcgctgtagccacccatctgagcgccgcaagacacaagtaataatccgcctgatattgctaaaatccctttggattttaacattccgagcaaatttttatgtatatttcttttcatgataacgtaaaaatttttaaattaaattatatttgcaatctgtactaaaaatgtaccaaaatacggttacaaaaatctatcaaaaatagatttttatttttagataacaataacataaaaaagttaaaaaaattttaaaaaataatggcaaaattaacctcaagaagcgaagattacagcaaatggtataatgagttggtggtaaaagccgacttagctgaaaactcaggagtacgaggatgcatggtgattaaaccatacggctatgcgatctgggaaaaaatgcgtgacgaaatggacaaaaaattcaaagagacaggtcacgttaatgcttatttcccgctttttgtgcccaaaagcttatttgaggctgaagaaaaaaacgcagaaggttttgctaaagaatgtgcagttgtaacccattacagattgaaaacagatccggacaatccttcaaaacttattgtagatccggatgctaaactggaagaagaacttatcgtacgtcctacttctgaagcaattatctggaatacttataaaaactggattcagtcttacagagatctacctatattaattaaccaatgggcgaatgttgtccgttgggaaatgagaacacgtcttttcctgagaacggcagaatttttatggcaggaagggcatactgctcatgctacaaaagatgaagcaattgaagaagctgaaaagatgaataaagtatatgcagattttgcagaaaacttcatggcaattcctgtaattcaggggttgaaaacgccttccgaaagatttgcaggagcagacgaaacctattgtattgaagcattgatgcaggacggaaaagctttacaggcgggaacatctcactttttaggacagaattttgcaaaagcatttgatgtgaaattcacgaataaggaaggtaaaattgaacatgcatgggcaacatcatggggaacttcaacgcgtttgatgggcgctttgattatgacgcactccgatgatttcggattggtacttcctcctactttggctccgattcaggtggtgattgttccgatctttaaaggtgaagagcaattggcgcagatcagcgaagtggctttagatattcaggctaaacttaaagctaaaggaatttctgtgaaatttgataatgatacacagaataaaccggggtggaaatttgcggaatatgaactgaaaggtgttcctgtaagaattgcaatgggaccaagagatcttgaaaacagatctgtggaaattgccagaagagataacttaacgaaagaagtccgttctattgacggtttagattcttatattgaagaattactgaaaaccattcagcaggatatttataataaagcatttgaattcagaaaaaataacatcacgaaagtagatacttatgaagaattcaaaaaggttttagaagaaaaaggaggattcatttatgcacattgggacggaactgccgaagaagaagagcagattaaggacgaaactaaggcaacgataagatgtattcctctggatgatgatattgaagaaggaatttcgttaatttccggtaaaccatcaaaaagaagagttttatttgcaaaagcttattagaacttaacataaaattattaaatctgcaaaaatttcaggaatttttgcagattttttttaaaatcaacatttggactattttttgtttaaatttatcttaacattaatctttaaaataaatttattatgtctttaaatgttattgatttaattaaaggacaattaggtccggctttagtatctcaggctgcatcacagttcggagaaagtgagtccgctatttcaaaagcaatcggaggtttattgcctgccgttgtgggaggtttagcaaacaaatctgataatcctgccgttttagatgcaatttcgggagcttcttccaatggaattttaagcaatctgatgggaggatcatcaaacaattctatcatttccagtcttttatcattaatttttggtgataaattaagtggaattgtaaacggaattgcaacctatgcaggaatcagcaacaattcgtcaagttcattactaaatctggtgactggtgcaaccatcggttctgtaggaaaatatgctgccgacaataatcttgataaaaatggaatttcaagtttacttagtgatcagaaaggtattatttctacacttttacctgcaggactttctttggcttcattaaatatgggcgactgggactgggctaaaggatacaaattcgacaatgataaggataccattaaaaatccggtttccgaagagccgaaaattgaggtaacaagaagtacagcgcctaacggaacttttccgaaaagaaataataatgacgaaggcggatctatctggaaatggctgcttccattattgcttttaatagcagcagcatatttcatctggaaacaatgcgagaaaaaagaaacgactacaacgactactatgacggactcgggtaaagtagttacagacaccgtaaatgctaaaacatccgatacagcttcaatgaagtctgcaagcactaaagttgatgagaatattgacttaaacggtgttgctttaaaaggatataaaggaggaatggaagacaatatgattacattcttaaaatccggtggttataaaaatgctaaagatgatgctgctttaaagaaaacgtggtataattttgaccatgtaaactttaaattgggaagcgctacagaacttgaagcaggatctgaaggacagcttcagaatttagtggctattttaaaagcatatcctgaagcaaaaataaaaattggcggttatacagataaaaccggagacgaagccaaaaaccttaagctttctgcagacagagccaactacattaagacatggctggaaaaacagggagttgggccacaggtaacgggagcagacggatatggaagtgagtttgcaacagtacctgcatctgcatctaatgaagaaagagcggttgacagaaaaatgtcagtacgatttacaaaataatattttaaagcataaatcataatcccgaaattatttttcgggattttttgttttctaatattctccgttttcatttatttaattatatttgttagtcattcctaacatttatgaatctgaaattaaaagccgcgtggcgaaaagataaaacatctcattcactatccgaagtatattcttcggtaaaagttcctaaaaatgcaaatttctggagaaaatatcttgcgtttgcaggtcccggattaatggttgccgtaggatatatggatcccggaaactgggctacagacattgcaggaggtgcacaatttggctacactctgctttctgtcattttaatttcaaatattttcgcaatggttttgcagcatctgtctgtgaaattaggagtggttgcggaaagagatttggcacaggcttgcagagatcattttagtccggcaaccaattttattctttggatattctgtgaaattgccattgcggcgtgcgatcttgcagaagttatcggttctgccattgcactgaacttactttttcatattcctcttacttggggaattgtcatcaccaccattgatgttcttttcattcttctccttcagtcaaaaggtttccgatggatcgaaagtattgtcggcggactgatttttattattctcgcctgttttgtgtatgaattggttatttctaaacctgctgttaatgaacttttaggtggtttgattcctcaaaaagagatcattcagaatcctgcaatgctttatattgcgatcgggattttgggagctaccgtgatgccccacaatctgtatttacacagcagcattgttcagacccgtgattacgagcgtacacaagaaggtaaaaaagaagcaatcaaatttgctactttagacagcaccgtttctttaatgcttgcttttttcatcaatgccgcgattcttattctggcggccgcaacttttcacacaacaggaaataaaaatgttgccgacattcatgacgcctataagatgctgactccgattttaggagcttcaatggcaagcattgcttttgcgattgctcttctcgcttccggacaaaattctacacttaccggaacacttgccggacagattgtaatggaaggttttctgaacatcagattaaaaccatggttgagaaggcttatcacgagactaattgctgtaattcccgctcttattgtggctattctttatggcgaagaaggaactaccgatctattggttttaagtcaggttatcctttcgatgcagttgagttttgcagtggttccgcttgttatgtttacgagtgataaaggtaaaatgggcgaatttgtcaacaaacctttcatgaaaatctgtgtctggattatttcgtttattattattattctgaatgtttatcttctgtatcagacttttttcgggaaatagtttaggaacaaaataattttctttttagattgacatcagttgtggtcaatatatttaattaatcattgtgcttaatttttaacgcagagtctgcaaagatttttaaagactcatgtccatttttaagtttacaaagccgttctacttagcaaagaactcaaaggtttttcaatgatgacaaattttagactattattatttttttcaaatctgatgtttgtaatgctattaaattttgccgaatctaaaaagaagggaattttcttgcactccatattaaattgcaaaaaaactcaaaatctgacgaaatgtcacgcttttttctttggcagaatgtttgtgaataaaaaggaaaataaagattgaattatggtaaatcaggatattaacgaagaaagcatcaataatcaagaagatacgaatattcagaacgaagcggcaactgaggaaaatgtgacagcaaaacctacggcagaggaacttttggcagaagaaaaggatcgttacatcagactgtacgcagaattcgaaaattataaaaaaagaacgagcaaagagaaaatggagtttttccagtatgcgaatcaggatatgatgatttctatgcttggcgtattggacgattttgaaagagcaattaaagaaattgcgaagaacggaaatcctgctgatctgcaaggtgttgaattaatttacaacaaattcaaaaataaactgacagaaaaaggactgaaagccatggaagtaaaagcgggagacagctttaatgtggatttccacgaagcgatcactcagattcctgctccgtcagaagatttgaaaggaaaaattgtagatgtaattgaaacaggatatactttaggagaaaaagtgatccgttttgcaaaagtagttacaggaaattaacataagcaataagtgatgggtaataagcaatttttgatattactcattattcattactaattactcatataaagatgtcaaaaagagattattacgaggttcttgagatcagcaaatctgcatcagccgacgaaataaagaaagcataccgtaaaatggccattaaatatcaccctgataaaaatccgggcgataaagaagccgaagaaaaatttaaagaagccgcagaagcttacgaagttctgagcgacgaacagaagcgtgcgcgatacgaccagttcggacacgcaggaatgggcggaaacggaggcttcggaggaggcggtttcggtggcggaatgaacatggaagatattttcagccagtttggagatattttcggtggcggtttcggaggatttagcggtggcggcggtggtcgtcaacaggtaaaaggttctaatttaagaatcagaattaagctgaatcttgaagaaatggtgaacggaacgcagaaaaccattaaagtaaagaaaatgaagatggcagaaggagccacttcaaaaacctgccctacctgtaacggttccggtgtacagcttaaggtgatgaatacgatgttcggacagatgcagacccaaacaacctgcggaacctgtcagggaatcggaaaagtggcagataaaattccagcgggagccaatgctcagggattagttaaagatgaagaggaagtaacaattaatattccggcgggagcaagagacggtatccagttaaatgtaagaggaaaaggtaatgatgctcctttcggcggaatcccgggagatttactggtgattatcgaagaggaaattgataaagtcattaaaagagaaggagataatcttcatcaggaattgtatatttcatttgctgaagcagctttaggaacgaaaaaagaggttccaacagttggcggaaaagtgaaaattacggtggatgcaggaacgcaatccggaaaaattctgagattagcaggaaaaggtcttccaagtatcgacagttacggaaaaggagatatgtttatccacatcaatgtatggactccgcaaaaacttacgaaagatcaaaaagatttctttgaaaagcagatgaacagcggagaaatggtagcagaaccatccggtaaagaaaaaactttctttgataaagtaaaagatctttttaattaactatatttatagaggcttttttaaagtctcttttttgaattttaaactactttaaattaaaaaacctgtacatattgtacttattgtaaaaatttctcatgaactacaagcttcaactccatacaccagaatctacggcgaatcttattttcaatacgattacttttgatgcattcaaaattaatattgttgagagatatttcggacctgctaaaaaatcatgcgaggttttatttaaagtaagaacgctggatgacaaactcgtagaaagaagagacggaaatatgagggtaaagatcaagaatgaagatcttgagacttacagacaacttctttctgtattaaaatcctatgagtataaaaatcatctgattaacagaaaaaatgcagaccaggattatgtacactttattctgcgactggtaattatgaactatgatctgaactaggtaattaaattatcttcgaaataaaaaattcgcggcttctacgaagccgcgaatttttactattattgatcaattttctatgcgcgttttactaaagaaaacaaagcttttccaatggtgaaaacagccacggcaagcaatcctcctccaagtcccagaatcaattctttaagaaccgtaagcattttatctgaagaccatgacggtagaatatggtggaaatactctattcggtgtgcaaaaattcctccggcaaccataatcagggcaatggttccgatcactcctaaagctttaatgactattggaagtgcttttacaagaagatgtcccagttttccgataattcctttatcgttactttttctgatcagtttaaagcctgcatcatccattcttacaattaaagctacaattccgtaaactcctactgttgcaataaaagcaaccaacgaagttaccagaatctgggtaataaaaggatgactttcttccagcactgttcccaaagcaataattacaatttcaatagacagaataaaatccgtagtaattgcagacttgatctttgccttttccgtttcttcagaattggtattcttctcctccacttcttctaccacttcatgcccttttttatccctgtgaaacagaaactctataatcttttccacgccttcaaaagcaagatataaacctcctaaaattaaaacataattaatcgcaggtggatacagccagttcagtacgaaaacaatcggaagaatgatgagcttattaatgaatgatccttttgtgattgcccaaagtacaggaagttctctggacgaaagaaaaccagtcgctttttcagcatttacagcgagatcatctcctaagattccagccgttttctgagttgctattttacttgtaaccgccacatcatccattaatgcagcaatatcatccaagatcgcaaaaaaaccagatgccataaaattttaatatttttttaatgtttgttaaagggcaaaaataattatttaattcggtttttcacatgactgaccgagctttatttaaacttatttatcgcttagttaatcaagattaattattttaaaatctgtatatcaaattgtattcctcataatttgtatattcgtaataatcatcaaaaaaaccatgaaacttacaggcgaattctaatttcagcctttaaaatcaaaatattacaatgatatactatacattcgatgtaaaaaacaccagcaatgaagttgtttcaaaagtgaagattgaaactgaaaagctgatagaagtttatgatgatgaaatggaaatctatcataagtatggcaaaaaattacctcatgatgttccaagacatattgaatatcaaaatatcacccgtttacggaaattactttcggaagcaaaaaacagatattgattttgcagaaaaaaatcaatatgtacaatctttttcaattaaagtaatgattcgcaaagattttcattcaattttttgtaaaaaatgcagtcaggaatattctcccgaagaagttatttacgaaacatggtctcggggagaaagtttatttgcttcggaaggaaaaactttattgtgtgaaaacaaccattttcttttcgggtatatgaaatggaactcatgataaaaaaataaaaatttctgccattattaatttttaaattctaattttctgtacatttattccatgaaaaagctgattcttcgttatcatttctttgttttagggttaattggctttattctgacttcatgcaatacgagaaaatttaaagtctgggtgggaacgaataacgaacagaaaatttacaatctgaaatatggcgaacataaaaggcagaaagcagacatttttcttccttcagattatcctgaaaattctccggttgttttattaattcatggcggagcatggactttgggcaaaaaagaacacatgatccagattcagaaaatgctttttaaaaataatattccgagtattaatatgaattaccggctggtttcaaaatcaaaaaaaatcacgtaccgggaacagcttgaagacatcaactcggtgattgccaaattcaacgaactggcgcagaaagcggagcttcaacccaacaattatatccttttgggagaaagtgcaggaggtcatcttgctttgctgtatggctatcaaaatcctgataaaattaaaaaaatcatctccttaagcggaccgacagatttttattctcctgaatatctcaattcattttactccaaatattcttcaccgaccatccaaaaagtggtgggaacaaaatttctgcgaaaaaatttatcggaagaatttaaaaaagccagtccgattgcccatatttcgaatgttccgacccttcattttcagggaaatcatgatttcttagtcagcccgaaacagggtattgctttagattctgctttaacggctcaaaatatccctcataagtttatttttatggaaaatacaggtcatgtgcctagattttttagcagaaagaaaagagacagcattatttatcccaatattttagaatggattaaggattagtttctgaaatcagaatttgtattttgaggttggcttttcgcgcttctgtatttgccaagcagaatgaatcttaaacatatcgcaaaaaacaacccgctcaaacgaacgggttagatctattttaaaagtacttttttatttttcgtcttcatcaaaattatgattctcatacttggaaaaatcctgtttctttccgaataaaaatttgataataaccggtactgttgttattagaacaatcacaatgataatcagttccaattttttcttaagatcaattccgaactgatcgatgaataatttatccagataatgtcctgcaaaaatcaataaaaacgaccagagaaccgctccgataacattatctcttaaaaatgcctttttatccatctttacgattcctgcaacaatcggggtgaatgttcttaccaccggtaaaaatcttgccatgataattgccaaagctccgtttttctcaaaaaaatcgtgcgcctgataaaggtatttctttttaaacaaccatgtatcctgttttttatacagagcagaacctgtttttcttccgaaataatagcctacttcatttccaacaattgccgctaaagctacagatgccgctaaaataaatgtatcaagaaaatcgctccctgtggagccgaaagtctctctgatgatatcaattgaataaattcccgaaacgaaaagcaatgaatcgcccggcaaaaaaaatcctacaaaaagacctgtttcggcgaaaatgataaacagaatgagccaaaatcccccaagcttgatataaaactccggatttaataaatctttccagctattgaaatcttccatacattttgataagtagcaaaaataggattaataaacgtcaatcggaaatttattatcagattttaacgaaatttaaacatcgtgttacaattccatatcatcatctgaaaccgccgttccatccgccatcaggaaagctttcaggaacggagtgatgtttccgttcatcacagaatccacatctgaagtttcgtatccggaacgcacatcttttaccagtttataaggatgcataacgtagtttcggatctggcttccccactcgatcttcattttattggcttcgatctcgttacgggctttcatacgctcttccagttccatttcgtataatcgggaacgaagcaactgcattgctttttccttattctgaagctgggaacgcgattctgagttttcaatgatgattcctgtaggtgcgtgacgaagacgaaccgccgtttctaccttgtttacgttctgacctcccgctccggaagatctcatagtttcgaatgaaatatcggcaggattgatgttgatttcaatggtatcatctaccaaaggatacacatacaccgaaacaaaactcgtgtgacgcttcgcattggaatcgaaaggcgaaattcttaccagacggtgaactccgttttctcctcttaaatagccgaatgcaaattctccttcaatttccagcgttacggtttttactccggcaacatccccttcctgaaagttcagttcacggatcttatagccctgtttttccgaccacatggtgtacattctcatcaacatcgaagcccagtcgcagctttctgttcctcctgctcccgctgtaatctgtaaaacggctgaaagctcatctccttcattggaaagcatatttttgaactcaaggtcttcgattttttcaaccagttgagggaaggtttcgtccagttctttctcagaatccggatcttctttggcaaattctgccaaaacctgtaaatcttcaaactgggtattgatttcgtcatacgcttccacccacttctttttggaacggagctgtttcagaaatccttcggcttctttaggattgtcccaaaactcaggagctgctgttttttcatcatcattagaaatttctatcttctttttatcgatctgaagatatttatgtaaatcatcaattcttgactgaatttcttttatctggtcgctgttaatcacgattgtttattttttgcaaaaatacggataaaattatgagtgcaaatttttgtcccttagatttcacgaattagtacagattcttgttgaaatatactttcagtttatatgttgatattcttagttaatttcaaatttaaacacataggtctactaagatttaaaatcttttagttatgtaaaaaggtactttgttaatacgcaaactatttttaatggtttgagcttttttgagaaagtaattgtttatgctattcatacggatgaaatattgtttgtatttttatattcttcataattgataatttagaaggagaagcccataagatattactggaaaataatgattcctattttattttcatcccgagacaagcattgagaaattctttagattaaaagtttaaacaagttcacattaaacattcttgggatgtttgaataaactaagttttttcaaaaatgattattaaattgcgtttcgctaaagaaatgaatatgcccaccaaaaaagaccttcgggaaaacctttcccttcagacatttgaaaacagcagtgaaacagaattatttcaaaataatgtgcttcgtcctgttttaaaattacaaaatgatattttcatccagatattcagagactatgcaatgagaaaaatgtctgacttcacttccctgaaaaacgagcagaaaataaatttcgccgaacaagcccttcaaaaagatattgccctgaaaaacacctacatcggaataacgatcggaatgctcactccggaagaaataacggtctatctttccgacagcaagtcttttaataaaagaatcatcaatatgctttttgagagaattaaaagtcagattgatgttgtataaaaaacaaaaggcttttcctgatcgtaattaacaatctcatacaatactctaaaagatagaaatttattcttatgatttcgtaactttagtactgcaaacaccaaaatatcaattcatgaaaaaatcaacctttttatgtttacttctcgtaatcatctctttctatagtactgccaaagcgcagaaaataacggacggacaaaccattgacctcaatggaatgagcgtaacctttaatattctgaataaagaaacaatacaaaacggaggaaaatcttttgaccgctataaagttgccgcatctgtaaaaaacacttcggataaatcctacaacatcaggctttcttcctatccgcaaatcgtaagcaacaccgcaatcgtagaactgaactgcattaatgcaaccggagccaaacttacttcaaaaaaaattgaacttaaaatgaaagcccagatcattaatgtaacctactctgcttatgacaaatccgggaaatttgtgaacagtattcttcccgtaattggaagttattattttgattccggagataccataaacgatgatgccattttcatcgtaccacaaggcgaaaaaccagacgttactgtaagaagtcttcgataaaatatcctaaagaagtggtctcaaaagtgaaaacaatttgacttttatcatttcgggagcagcaaagaatttctaaaatcaattatttaggtaatgtactgaaaaatagttggtgaaattcaggatatattttaataaattatgcacgttaatccgaagaggacaaaagcactggtggagatcaacttttcagcaataggattaatgttcaaaannnnnnnnnnnnnnnnnnnnnnnnnnnnnnnnnnnnnnnnnnnnnnnnnnnnnnnnnnnnnnnnnnnnnnnnnnnnnnnnnnnnnnnnnnnnnnnnnnnncctgccgtaacatggaaagtgaaaaatgccttccctctgaaattacagtcaaccgatctgaaagctgaaggtaatgaagtagcaattgaaactttggaaattgcgcacgaaggtttaactattgaacataactaatcatggctcttttatatcctccaaccagtttctcttttattgttaacgggatttcgacaacagagggtattgactccagatttcagtctatatctggtttatctacagaaattcagaccgaagaatatgccgaaggaggcgaaaacagatttcttcatcagcttcctctgagaccgaaatatgataatttagttcttaagcgtggcttgattgtaagttcaggattaataagctggtgcagaaatgcaatggaaaacttcgagtttgaacccagagatcttgtcatcacactttcaggaggacttcagtctacagcaccgttaatggtctggaatgtggttggagcctatccggtaaaatggaacgtttcagaattcaacgcagaagaaagcagacttgccattgaaacaatagagctgaaatacagatatttcaaaataccctcatcgttagcaagtttaggcttgtaatttctaaatcaaatctaagcacttaccgtgtgttagttttcagataacattcagcaaaaattttaagataaaaaaataaaggattggtctataacaggactgaacacacgctttatgtgcttagatttttttaaataaatacgttaaataattggttttaagttttttacgtattaataattaattaaaaataaacgaaatgccaatagaaataaaagagcttcacattaaaataaatgtggacgaaaaagcagccgcaacgacaactaccgcatcagtagatgaaggaaaaattatgtgtgcaattagcgaaagcgtagagcaggcagtaaatatagaaaaacgtaaaaaagaaagataatgataggagaaataaagaaaacaggaggagaagttttgaaagtaaagataggaacgtacaaggatattaactttaaaagtgttattgatagtgatgcatttgaagcctttattaatccgacaggtttttctttcaccagtaaaatagaatataacactgcccaagagcaaggtgcagcaggaagtagtccaaaatttgttaaagttgctcctcaagcattacaaatggaatttttatttgatggcactggagtaacggaaacatattcgggtaataaacttgtcaatgtcataaagaaaaataaattcaagcatgatactgttaatttacagttagaacgtttttataaagcaacaggtgaatttaagggatcatttcataaaccatatagtgttattgtgatatggggagaatttgaatttaaaggtgctcttacggagtttacagtagattataaaatgttcaacaaagatggaacaccgttaagagctataggtaaagcaacttttgtagaaggtatcagtcaagaacttattgcagaaaaagctaaaaaatcttctccagaccttacccacaaaagaaccgtacagtcaggagacactttacccttaatgactgaaagaatttacggagactccaaatattatctggaagttgctaaagttaacaatctcatcaatttcagacagttgaaaccgggaactgaactctactttccacccatagaaaaaatagcataacatgaacaacagcggatacataaaaacatcaaaaaatccggatctgatcacttttaaagtaatgtccggaggtaccgagttgccggggaaatatggggtaaaaagtattgttgtagaaaaagaagtaaacagaattccttatgcccgcattgttattttggatggaagcgtaccggaacaggattttaaactaagcaatgaagatcttctgattcccggaaaagaaattgaaattaccgcaggttatcattcggacgaagaaagcatttttaaaggagtggttgtaaagcacaacatcaaagtgagaaacggctcttcttatctcatcatagaatgcagagataaagcggtgaaaatgactttaggcagaaaaagtaaatatttctacgacagtaaagacagcgatattatcggcgaactcatcagtaacaacggattgactgccgatgttcaggctacctcaaattcacacaaagaattgattcagtacagagcttccgactgggattttatgctcaccagagcacaggcaaacggaaaactttgttttgtagaagacggaaccgttaaaatagcgaaacccgatttcagtaaaaaagaagtggaaacagtggtttacggatcttcggtgcatgagtttgacggagaaatagacgcaagagatcagttcaaaaaaatttcagccaaaacatggagctataccgatcaggaacttacagaagtggaagctcaggatcctggcgtaaaacttaacggaaacctttcaccggatgatctggcaaaagtatttggaatagacgatctgcagcttaaacatggcggaaatcttacgcagagtgaacttcaggactggagtgatgcgaaagcaactttccagcaactggcaaagaccagaggaagggtaaaatttcagggaattccggctgtaaaaccgggagtttcattaatgctgcaaggcgtaggaaaccgtttcaacggaaaaatttacataacaggcgtccgtcacgaaattgctgaaggaaactggttggttgatgcacaattcgggctttctccaacatggttctcagaaacatatgatgtgagcgaaatgccgggttcagggattattccttccatcagcggactgcacatcgggaaagtatcccagctggaatctgatcccgatggagaagacagaattctggtgcagatcccgatcatcaataacgaagtggagggaatctgggcgcgtgtagccacacttgatgcaggagaaaacagaggatcattcttcagaccggaaatcggagatgaggtaatcattggttttattaatgatgatcccaatgacgcagtagttctgggaatgctgaacagcagcgcaaaaccggctcctattgtagcttccgatgacaacaacgaaaaaggatttgttacccgcagcaaaatgaagatgatttttaatgacgataaaatttcatacacccttgaaacaccaaaaggcaaaaaaataactgtagacgaagatgcagatgtcattaaaatagaagacgagcataaaaatactcttaccctcaataaagacgggatcagtatggaaagtgggaaagacatcaggatcaaagcaaaaggtgatattaagatggaaggaaccaatatcggtatcaaagcatccgcacagttcaaagcagaaggaagttccggttctgagcttaaatcaggtgcagtaaccgtcgtaaaaggatctcaagttaaaatcaattaatcatgaaaccggcagcaagaattacagatatgcatacctgtccgatggtaacgggaactaccccgcacgttggcgggcccatcattccggcaggagaacccaccgtattgatcggaggtaaacccgcagcaagagtaggagacaaagcaatatgcacaggtccgcccgataccattgcagcaggatcttcaagcgtaatgatcggcggaaaaccagccgcaagaatgggagattctaccgctcacggaggcgtaataagcgcgggtgaagctactgttttaataggcggatgatacacagcctgcaagattaaaaaatgtaaaaacatcaataacaaaacggttagaaaactaaaactctatgttacagatgcgagatgttacaattaaatataatacaagaacgtatgaaaataaatacagattttttaggaataggctggagtttcccgcctgagtttaatgagactgaaggaaagctggtaatgactacagatgtggaagacatcaacaacagtttgatcattttactctccacaagaccgggagaacgcgtcatgttccccgattacggatgcgacctgcaggaaatgcttttcaaacctttggacttaacgctgattacccagatgaaaggaatcatcgagcgtgccattttataccacgagcccagaataaacattttaaatatcgacatcgatactcaggaagaactggaaggcgaagtgttgataaaaattgattacgaagtaaggaatacgaataccagaagcaatatggttttccctttctataaaggtgaagctactgaaatataaataattacgggatgtctgtaaccattttgaatactaccgaaacattacattaagtattgcatctgaccatagaatataaatataaacaaatgaaaaaaacagatacattttcacattatcgtgaaggaaaatcacaaatgcagcgctttttagcggatctggatcccggcaatctcgaattgcacgacttcgatctgttcgattggctgctatttgcaaacaattttgccagtcatgtaaatttttttgaaaaagatgctgatacagcaataccagataagaagtggagaaactttttctttggtgatgataccaatgctattccgcgccgagaaagcgtagagtacaaaagtatgaaaaaacaggttacagatcttatttcccagtttgaacaggacagcaatctgacgcctcaccttactttgttcgtctgctttctgaaattgctggatttttccaaaaaagctttcaataatttaacgaaaagacatctggatttctactataacgagatccttcagattcagaagaatgatgctaaagaagacaaagtctatgtgatttttgaattggctaaaaaagccattcaggaaagaattccggaaggaacacttctggacggagataaagatgcggaaggaaagaaacggatctacaaaaccaataatgaactgattgccaatcaggcaaaagtagttgaaattaaaagtcttcttaacgacagtggaaaacaagagcttaaaatggctccggttaccaattctgccgatggtttgggcgaaaaactgccggaaggcggaaactattggtggccgttcggatacaatgctgaagaaacagcttcgggcaaatctatttataaagaacttccaaaagcgaaactgggattttctgtagcatcatctttattcgatttaaaagaaggagacagaacaattaccctgaaaatagatttcaacgcaaattctgttcaaaaactaaaaaaccttgaaaaagaagattttcagaacaacatcaaagtactttgcagcggggagaaagaatggttatccgacattgcattacagtgtactgaaaatggagaaataggaaccaaaagtgataaaaaacaccgtttaacattttctttaacattaccgaaagattttcctgccatcgtaaaatacaataaagatgttctgaaggaaacattccagaccagctttcctgttctcagattcatgattgaagggaagaaatattatgaagtctatgaagctttttcagaagcattggtcaacaatattgaagtttctgtagatgtaaaagggataaaatctcttcagattgaaaatgacaatggagaactgaattccgaaaaatcctattatccatttactgcgcagccgatcaaaggttccaatttttacataaaatgtcctgaaatgttctctaaaaagtggaaaactgcagacattaccatcaattggaaaaacacgccggcttccataaaggatttatacagcgggtatatcatggaaccggatacaaatatcagtcagcaggattttaataatttgaaaaattcgtcggttgtaacaggagacgattattttaagatcgatacagctttattagacaaagaaatctggcacaatcaggaaaatgatattgctttatttaaaaagaatggaaatgtttaccaaacacaattttctgtaaaaagcaccagtgatgaagcaggtacaggcgaagcgatcagagtaaaactgaagaaatctttattacaggacttgtatcctaaattatatacgcttgttttatcagatcctcaaaaactgaaagtagttcctaacgaaccttatattccttttgcggaagatattgagttgagttacagcgcaacagaaaccgcataccattctttaagaaaagattctgaaggagaacttctgaaaagtgaagaagtacagatgtatcatgaagatgctttcgggcagtatgaaaaggaaatcgatacgaaaaccattgttccggtacatcagaaaggaggcgaattgtacatcggtctggaagcagttccgcaaatgacggtttcccttctcatccagatgctggaaggaagcgaaaatcctttagccgagacttttgaagaaaaagaatatatcgaatggagcatcctttccggaaatacatggattgatctttcaaactctatgctgcagaatgattctaaaaaattcctggaatccggaattgtaaaattcaaaattccaaaagatattaatttgaatcacacaagatttacagatcagttaatctgggtaagagcaagatcaggaagaagttacgatgctgtttgtaaagttcagggaatatatacacaggcagttctggcaacattccagaatcagaacaacgatctgtcccacttaaacaacggtttggaagccaatacgatttccagacttattaccagagttccacaggtaaaatctgtgagccagccgtataactcattcgacggaaaatataaagaaacagatacagaattctacagaagagtaagtgaaagactgagacataaaaacagagccgttacacaatgggattacgagcatctcgttttgcaggaatttccggaagttttcaaggtaaaatgcctgaatcatacttcagaaaagtcttacctcgctccaggatatgttacgctgatggttgttccgaatattaaaaataagaacgcttttgatatttatcagccaagagtaagcagagccacgcttaacaggattcagaattatataaatgaattgaataccatgcacatcaacgctcaggtaatcaacccgaattataaagaagcgaaggtagaaacaaaggtgaaattcttcgatcagtatgatgaaacattttacacaaaacagttagacgaagacatcaaaaagtacatatcgccttgggcttttacagacactaaagatattgattttaatgtgaaactgaatgttaatcagctcattaattatctggaacaactgcattatgtagactacgttgaggagaccagtatattggtaaataatgttttacagacacagtctttaatcgaagtagatccgaaatccatactcgtatctgccaaacagcacaaagttactattgcagaaccggtatgcctttaataacaaacaagcagaaacataattatgtcagaaaataagcacattagtatacccaaaaatatagaaacgcaggatcagaccgattttcactttctacgcagaacaggtattgaatatatagaaggattaggaggaaaactttggacagattataactctcacgatccggggattaccacactggaggttttaagctacgccatcacagatcttggaatgaggatgaatatgaatatggaagacattcttgcttcaaacgatgcaaaaaaagatattcatacacaattcctgaaagctacggaagttttaccttccagacctttaacggagcttgattacagaaagctcttcatcgatatcagctttaaattcggtcatccgagaccaatcagcaactgttggctggttccgagaaccgaaatgctgtatgtggattgtaaaacaggacagttggattttgaacctatcggagaaaagacacaacattttaacgtaaaaggattgtatgacctttatgtagattatgccgatgatatagacgatagtgagaatgaagattgtgacaaatcgaatgcaagagtaaaaatactggagcgttatcaccagaacagaggtctttgcgaagatcttgtagatattaaagaaatcgaaacccagaaagtggcggtatgtgcccgcatcggacttgtaaataaagtagatgaggaactggttcatgcaaaggtaatcagagcaatcaacaattatctggctccggaagttcatttttattcattaaagcagatgctggaaaaaggtcttaccacagatgagatttttgacggaccgattctcgataatggttttattgatacggaagaattgaaagcaagtcagttaagaagagaagtccgactttctgatatcatcagcgaaatcatgaaaatcgacggagtgaaagaaattcacgaaatttctattgccggatgcgacagcgcagtgaaacagaccgatgactggatgatctgtattgaaaaaggtaaaaaaccggagctttgcgatctgagttcattcagttacaccaaaggtgcgcttccgttgaatattaacactaaaaaagtagatgaatatctcgaaacgttaagaaaagaggaggaagtactaagagaagatgcaagacaaaataaagagttgactctgccacagggaacttcatacgatatcggaaattacgcgactattttaaatgaatttccggatacgtacggagtaggaatttccggaatcatcggaaatccaaccccggaaagagaagctttggcaaaacagatgaaaggatatcttttgtttttcgaccagattcttgccagttattttaaacaccttgaaaaagtaaaagaagttttaagtatcagtggaggtttaaaaagaacgttctttactcaggctcttaaaaacatcaaaggttttgaagaattggtttcggattatgatgaaaacgacgacaaacttacagatactttatacgaggagcttgataacagcgtggaacgccgaaatgaagtgctggatcatttgattgcccgttttgcagaaacattcagcgactatactttcctgatgaaatctctgtacggaaaatctaccgatgaaattgtactgaacaataaagaaaccttcttaaacgaatacaaatcgttgagcaaagaccgtggattgggctataattatacattagatgataccgcgaatgtctggaatacagacaatgtttcaggggtacagaaaagaattgcccgattactggggattaaaaattatcagcaaagaaatctttctcaaacacctgtttcgattattaaatcggtaagtgacgacggaacggtaagctattcatggaaaataaaagatggaaataataatatcactttatcatccgtaaattcattccacatcgaatatgcggcaactaaaaatctgcatgaagccatttaccagaccattcagatagacgaagaagatcttaaaaatgctttagagcttttacaggaaaatcagactcattatgatttgattgggaatattcagataaaaatgtcttcgggagggaactattatcttgaaattatagatgacagccagctacaaaatgtaatggctactcataaaatgaccaatccgtacccttctttagctgaattaaaaaagggaattgaagaactggtaagatatttcaaatatgattttaccgaagaaggaattttccttgtagagcatttgttgctgaaaccagcatttaaagattacaaactgatcaaaggaatcggttgtatgtctatagaagacacattcaaagtttttcaggatcttgaagggatcggaagtatgatcgtaggaacctcttttgaagtagctccgaatgaagacggcgatattctttccggaaatccggtagattatgcagatgccttaatgtcctcttgtgaagaagactgtgaatatgatgtttttgatccttattcttaccgcgtaagtgtggttcttcccggctttgcctaccgttttcaggatcctgacttcagacgttatgcagaaactgtgatccgacaggaaattccggctcatattctggctaaaatctgttgggttggagatcgtttaagtgaaaaacaaactgctcagagtgatttgtctgcatttgaaacagcattcaaaaaatatctttcagataaagcaaaaaataatattaacaatttaggaaacagcattcagaatttactgacagctcttaccaacttaaataatatttacagaccgggaagactcttagactgtgctgtggaagataacgacagcctggacggaaaaataatattaggacaatcaaacatataaaattgaaaaacaatgaatgctaaattagataatgtaacaacccaatatagaaaatttaacgaaaatcaggtacttacggatgggcagttaaatgaattcatagactatttcgaagatcaggacaggctctcgagaacacttctcagcggggtaggaattgtatgcggatttaaatccacaattaccagttccggtctcattacagacgttatggaaaaaatagctccgcaaaaggctgaaaatgctttggataccattgtgattacccagggagcaggcgttaccacagacggagatttaataacccttcgtacaggacaagataaatcttcagacgttacgatagatttcgataccaaaaattacagatacttcagagagtataaagacaaagtgaagtatgatcatttccgaatcggagaagaccagattcctttattggaactggcaaccgaagacgaactgaagcaaatgaaaattaaaggattagacacaggaagttttaaagatgttaaaaccttggaaaaactgaatgaaaagatcattatcctttatctggaaagctactctaatgatgaaacgccttgtgaagatgcggattgtgataacaccggagcagagcaggtttctgatcttaaagtacttttggcagattttcagtcggtttcagatcttatgacgagcggaaatgcaaaagatacgctgtataaaattcataattcttacgaagaactttttgaccgcttaccgaatattgaggctaaaagagtgattcttgatcctaaagttgaaacagcagaccagttaaaaacaaaatttcgtaacgccatggattctgtttcgaaattgtccgacggttttggtgctattgcagatacttttaaaatagatcttaacttcagtggtttatcgctttttaataaactcaatactttattgtctgcatcttccccaagactggatgattttcagtacagatatgatctcctgaaagatctcattgatacttacaatgaaataaaaggactgatcttacatctgaatgtagaatgttgcccgactattgcttcattccctaaacatttgatgttgggatatgtcggaggttctttggaattgggtgattatgcagctttccgtcacggattctatcattctcccatcacaacccaagatgatgaaaattatgaaaggctgatgttgcttgccaatcgttttgtgcagaaaatcaacggatttcagtcgtatgtaggaccggttaaaattacaccgtccaatctttatgtaagattaggagaaaaagcaatcccatattattataatgtcgataagtctttacttgataagtggaatttcgaaaagacaaaaacagacagagaaacgtataatttaagttatcatactgcgaacttatcatcagaagattatgttcagaatcctctgaattataatatcgataacaatgatttttacagaattgaaggacatcttggattgccttatgaaacagcggtacagaatattaatgatcttaaagtgaagtacggactggcttttgacgttagcgttttacttttaaatgacggtaaaaaaacagacgatgaacctgaagaaccaagaaaagtttccattgaagaactcagaaataaattattgtctatttccaatgatatcagcaaagaaacaggagacccgaagaacgcactccttaatttatccaaattagacagcgatcttaagttattgaataaagctaaatttgaaacgccttccggaacatcagacgatgtaacgatcgtaaaagaagatcccagaaaagaagaaatttctacagaacttttaagcggatttttagaaagaaaatctggtttggagcatctttccggtgtagaaccgggcggaacatttgttttgatcgcagaatcgaaggcaaacaatcaggttcttgcagatttctcattgtcttatttatgttgttctaaaaaagatcctgtattcttatcattaccttcaggtaaactttgccaaaatgaaaaaccggttcttatgacaatcgttcctttggatggtcaggtaaaagcatttgtaaacggaacagaaatatccgccattacccagaccggaggacaaagttattttgatccggcattagttggcgcagcttatctcggacaaaccattactttcacagtaaatgatgatcctgtggatactcaaatgattgttaatgaagttccaaatgttacggtaacaacagggactcctgtaaatggagaaaaccctacaaatcctacagcaacggtaacatttactgtttccggtaataatttaggtaatcttgactataactggaatttcggtgacggtcagttagttactgtaacgaaaccagctcctgatgcaaatggagttgtaaatcaatctcatacctataatctggttgctggtcaggaagatacgttcaacccgatactttctgtgagtaatggaagtgaatgcagcacacaatatacgatatcccctataaaactgaaaggtcagtcactcgttcagtgtctctctagtctggagattaccgttcagtacaatgaaagcttaggaccatgtcccggaaatcacagatgtaatagcgcgaaattcaatttaatggcgaacggagtgtacagaatcggtggtgtgaacctgaataatgcaagtgaaactcttgaaaacggacaattacgtccgaatggtgaacttagaggaccaaacaggattaataccttcttcctgagtcctacggatgcacagtctatcgcagccacagatctgaatggggaagggtttatatcattctctttagtatgtgcagacaatagctgtcatgatggtgtggcatggactacattaaaacttggcggagtcgtgatttatgacggatgtcctagaaataatttcttaacaattaatccttgtacaggagaagtaaaaccataatagtatgaaactgattgatacatatgaaaaagacggaattacgattgaggtaaacagcttattaactacaaaagattctgtgattgatataaagcagatttttatcctgaacgatgtggtgtatataagtttcgatactgtacaggacaggattcttatgtcggaaacagcagagatttttatccggaagtatagggaatatttaaatacgcttacaaaaaaagtatttactgcccagtcttcctgtaaatgccagacttgccaataagttcagttaagaatcagagcagtaattaaaataacaccttagaaatacatttgtctaaggtgttgtttaaatcattttaacaaatcattaaaaatgaacaataatgaataatcaattaaataatataccgaatccataccggaagttcattaaattaagtgatgtatctacccaataccggaaattcagtaaaggacagtacattgagtatactcagttcaatgagtttttagacttttttgaagatcaggatcgcttatccagagtaatgcttcagggtgtaggtatagtatgtggttttaaacctgagcttatctattccaataaaatacttaacagcataaaactttcgcagggagttgcagttacaacagacggagatttgcttaccctgaataatacgagtaaggtaagcgaagagttatatgtaagtgatttaaagacaatcagcattgatagtaaagaatatactcactttaaaaaatacgacaatttcaaggtaaactatcctccattttatgacgaaaacggaggacagattgaactttgggaactggcgacagttcaggaagcaacttcggattttcagcctgttgctaatttctcaaatctggaagatcaatatttaatgctctatctggaaagctatgagaaagaagtaaagccttgtagaggcgtcgactgtgacaaccacggaattcagcagatccgaaatcttaaagtgttggttacaaacgaacagggtgttaattatattcttcaaaaagaccgtattcagccgcatccgttatttatagaagacatattaggaagtgtaaagcaggagcgcgtgattctggaaaggcttattcaggaaaaaggaattgaaacaagattttcctatgccgatttaaaaaatatgtatgccgatgttttagaaagaaacggctatggtgagctggtttttagaaaaatctacgaaatttctaaaatgtttggacttcctgttgcggatcatcttacttttaaaagtgttttggaagaatgtcttaatcttccgtttggttttcagtatgcttatgatgtggtaaaagatttaacggctacgtattccgaaatcatcagactgcttcctaagacttttacgaagtgtcttcccgattttgcttcttttcctaagcatatgatgttagggaaattaaattcagaaactcagctggattcttcaagacatcagttttacaattctccggtcttggatgatgaaaaggcgatgcagagagttaaaacattaattagccgttttaatttgcaggtacagaattttaaatatccaaaccgcaatgtagaagtaattgggaatgatataccaatagaagcggaatctgcgattaaaattaccccgtctcaaaagtcagagttcttagggaataaagcaatccctttttattacaggattacagataattttctcaaagtttgggattttaataaagtaagaactccagctttccgaaataatgtaggctataattctggtcttttctcacaagaatcttatgtgagaaaacctttaggttttaacattgacagagcttcattttataatattgagggacatcagggaatgcattatcaggatgcatttgatcagataaaaaaaatcagagatgagcaacagctcggatttgatatcatgcttttgtctttcaaagaattattaaaaaataaagatctttcaaagtcgtattttaatgaatatattgataaatattcgggtttagaacacaaacacggagttgcaaaaggaggtacttttatcatggtgtatgatcatattgggagaaatgaagttattgtggcagatttctcgcttccgtacatctgctgtacaccggaagtgaagattaatctgagtttaccgaatacgactatttgtgccaaagcggagaaaattccgtttactgtatttcctttcaatggcatcgtaacggcaaatgtagattctgatctggatggtggtgtagagttagttgacggattatacttctttaatcctgcatcggtaagtcaggaattgcataaccagctaatcagttttaatattaacggaaaacctactgattgtactattacagtgattacagaaccgcaggtgagaattgtcgtggagaaagttgatcttcctgagtctgattcaacatcaactgttttgaaattcaaaataacaggagaaaatttcatggattatcagtatagctgggatttccttgataatggaagtcaggtaattcaaaatccggattcaaaaggttttgtaactcatacgtttaataatctttctccgagaaaaattccgaacataaaagtaaaagttattggaggcggatgtgaacagaatgtatctcttgaaaattggtacgaagaaaatcccatcattattaaaggtatcgtcttcgaggaaggaggagactgctgtgaaggacgtattcctaaataaatatcacaataagaaagggggtccttatgcagttgaaagattaaaaattcaccctttgcttattaaatttaataacaatataaaataaaataatggcaacagaaacatgcaatatttcatttaaggtagattacacatcttctaagccaataaaaagcgtaattgcttattataaaaataaaaacggaagtccgtctgatccatattccgaatacaatataaatcctattccaagctcttcagacactgtaaagcttccttttattcaggatgaaggtgactatgagctcattgtagaattaatggatgaagatggagttatagctaaagaaacaagctcttttaaaattggaaattgttcgggagataaaccaaaagtgagcattaaatggagagataactcaggaacagaagacagaatctgtactacatctaattgtgaagaatatgtcatttctgctaattattctgatgcggataataatataaatactgtagaagtatttataagtcaggataatgggataacctggtcaagtattatttctaatttatcgggtagtacaacttttggtacaggtgcattatccacaattggcaaaagattatttaaagttgtcgttaccgatttatcgggcaatgtaactgaatcaaattggctttcttatacaaaagaaaaagaacagctttcaatctgcaaacaactatataattttaaaaattcgagattagatgtagatagtttaccagttacaaaagattgggttactgcaacagttgatgtagatgcctctgcagtaggagtatcaatgagtttatctcatgaaatttattatagaagatgtaatgacttatttcttaacagagttcaggtaataggaactaaaaatgaaattttacaggatttcgaagttcctaatgatttgcaaagcggaattacaggatacaagtctgtaccttttacctatactccgcaggttgcagggcagctaaaagttagaatcagcgaatatacttctttcgcaatggcagatgatacaccggcatatttgcatatagattctcagcttttattcttagatgaaggggagatttgtagcagtatttctgcagaacataatttttcaatatatcgtggtacagattgcattgaatctgattaacatatttactgcattattaggcattaaacaaaaaatcctcaataaattttgaggatttttattctatgataaagctttctatcaccttctgttatttttacgtctcgtactgatgatattgaaaagtttggcaacatcctgaagatgaatttcaaaatcctcgtaatattcattcagagaatgaagagtgataatgcctcgttccacatcatgattgatgatccttttcacgagaatccctttttctttgtgtacgatgacaaaatcccatttatcataatgcagtttgctcatccagtaatcctggcggatatttctgcataaaataatatcgccttcaaggtagctttcgtaggagccgtcgtccatactgtctccccgaacttcaaagcacatatattcgccgcggtgttccacatcatcactgaaaggaatcgtgggtaaactttctatatattcctcatctgcaaatctgctcagatatccggcttgtgcgtattggttcgccagcggaacgtacatgatctttagatccgaataagcaaccggcgatgcgctattatcaggtttctgctgctgttcctgcagcatgttttttacaaaataagcagtggtttcaggtatttttctttcgcctttttcccagtactggacggctctcgtaccaactcctatcgcctcggcaatctcggcctgcttcatctttaatttctttctgatctctttgaattctaagttggtcattttgatatgtttatcgttatttatgaaaaaatacgcaaaatatttttcttttttattttgaaatacgaacaatgttcgtatatttgtctcgttgttaaaacagaatacggcaaatgtacaaaaattatcacaacaatttaatacatatttgatgctttttaattttttttggtttaatataggttgttaatcaaatatttaaaattgtttgtgtacattttgtttacagacagaagataaacgttcagtaatacaaaacaatgtaaaaagtgcgtttttatattgatgtgaatatttttattattgattttaaattcttttttccgaaaaatgtgcatttttttaaatggtaatgcgaacatttgctgttttgttttaacgaccataaacacagaccgtgaaaatgtaagacaaaaatgctgttccagattataaaatatcgattcattataactgtcagtaataatttaaatacattccaaagcggagaatctgagtttgcagaaataaattcattttttaatatgaatttgtttaaacttttttaaataaagagattcttgttggaagaagcaaagacgcaagattttattggactcaaatcttttgagacgcagaaaaatcaaagatttttaataaggattgatgcttaatttatcgcagataaaatctttgcgccttaagccaagaccgtatgtaatgaatattttgcgcccttgctattaagattaaacaaattgtatatgaagatacttttcgcagatgaaggaaaataaaattcaggaagacaggccgatgaaactgcgccggaaaacatcggaagccgacttctgggaattaaaatcaaacaacatcattaaacatcttttctgaggcagaatttaagcctttgcgggattttattgactcaactgatcaaaaaaagacacgaaaaattattttattaaaacaacttttaacctttttaaaaatgaaacgtagtaaagaacttgtagagaaaagaaaagactttgtcaacgattatgtaaaacgcaatcaggacaagcaaatgaaagttattgtaaccgaacttacggagatgctgtttttgtcggaaagaaccatttacaacatcattcaggagtaaaacggaaaaacaaaagtcattaaagatctgcatttcgtgaggcttcctcaggacaatcttttacaactgatccaccatcacaaaaaattagagccggaaaattatattctaaaaagcttaagaccaagcaaccgcacagttcagtgcttctaattcaatctgcccatcagatcaataaaagattgtcttttcgttatccatttaatttatagagaattacagcaaggtaaaaactgttttactttccggaacgatgcttttaaggctaaagacgagcctgcaatacaatggtttcgaaagtaacaggaagaaattgaaaattaaaaatcagcattaataaattttggtagtcatggaaaaagaagagaaaaaaaaaattaaagaaaacttagaaaaatttcaggatcccgatagagacatcagtgatcttatagacgagctggcttacctcagcgaaaacgaaaacatcgaaacgagcagaaaatttctggatgatatgtatatgctcgatcaggacgattaacaacttagcgttgtaaaaaatcaattttaatgaataacaatatgaagaatgaatttagatagcataaaagccctcctcatcggaactgccattgcattttcgggaggactgttaagagtattgatctccatacagaacaaagaaaaaaagaggccttgggaacatatcatcaccttaattatcgtgattattgtcggtttcaccatgagctatgtcatgaaaagtgccgaactccacaacaaatggtattctacaggaatattgtttgtactaggttatggctacgacaagttcctgaaaatgattaccaccaatcttcctaactggattgatacaaccatgaatctttacatcggaaaccagcctaacagacagcctgaagaagaaaaagagaaaaaagaagagatcaaataagagcctaaagaacccctccgaagcacgacaagtatcaaaaacaattaattattgttgttaaaaaccaacatctgaaaacgtcatacgtgaaagggctgaattcctttaaaatactatttgaatcttgtgtattaagctttaggaaaagtgggttggaataaaattgtaatgcggtaaggttaaaataacgtgaactcgatctatattcttattattttgggcagcttttccgccctccgttcccgctttttgtagttttgccaaagcttttccagtcacaaaaactacaaaagagctccactcaggtcgggctgcaacagcattgtgcaaaaacactccaaaacaaatcgtaagtagatgatatacaattttttatcatcgagttaatgttaaaatatagtgtaccggagtgtagaacgagtgagcagtaataaaaatgtagtgtagtaagcttaaaatgttaagcagtaagcagtagaaaaggtgagcagtagtaaaaatgtagtgtagtaaacagcagaaaaggtgagcaataataaagttgcagaacagtaagccttcaatctaaggcagtagaatgtaaatggagaatattttgttaaaattgctgtacagtaagctttcaatccataacagtggaatataaatatagaatactgcaataaaattgcataacaataaacgtccaattaaataatctctttgatttttttaacttatgtactcttttttttcattaaagcattaaactaaaaaaactaaagtgtttaaatcttttgcatcctttgtggtaaaaaagtttaaaggaggaagaatactgcaataaaattgtataacagtaaatgtcccatttaaaataatcaggacattaaaaaatctttgatttttttaacttatgtgctcttttttttcattaaagcattaaactaaaaaaactaaaatgtttaaatcttttgcatcctttgtggtaaaagtttaaaataaatttctgtattaccgtcatcagaaatcatttcaggaaaccacttactgcaactacagaatcctccgctccaaaaaagacttattctccttaaaaattctgaattttggatctggaatttcagccggatcaaaagaaaaaagcatagcacctccgatttctcatcataacgctgtgtagaccttacaggcagtaaaatcttaaaaaactacgttaccgggtctgatttttcagttccatcaggtacggtaaagcacgactcccattgttgtgctttacgtgcctttcaaacaaaatataattaaaaacaccaagtcaatgaaagcagcaaaacctgtagaaaaagacaataaaaaccatcatagccagagcaaaaagcagaaggctaaaaaaccagtggtggtacctctgcccgtggcggaagtggctcctttacaaacacaaaagcctgaagaatctgcagctctcgcaggattcgcaaccccgaatatcaataagacgaatgcaagcggaattattgctccggttcacggttcacagaccatttacgatcagggttctgagatcatgtttaaaaagcatcaggaaagtctggcagaaaccggagatatcaatcatccgcaaacaaaaaaagcggaaaaaaattatacttccacgctgaacatcagtcaggttaaagattatcatgatctgaaatccggaacgtatgtgccgaaaacgttggaggaacaggcagcaatggctcaaagcaacggcaatagtaattctgaaacagcagttccagccttagcagattctgttaacatatctgaagtgcaggattccgttgctgcaatggatctcagttcagagtttactttagcaggcgaacaggaagaagccgctagaacaacgccaaccagcgcgaacagtgatccgaaatttaaccagactataggtttggttaaaaatacggcaaaagtgaaaagcacacacagttccaaagaaaaggcagaaagccatgccaacgctgctgctgccgtacctgccggagagcgaaaatcgaaagcaagaggtcagcaggtagaacagctgagtcagcaaagatcagaaccttttaaagcttcagatttcaagagaaaattagaaagcaaaatcaccaaaatgaaactgccaagtaatgaaaaagaggcagataattttgaaaaaaataataatattgggcaagtaaacaaatcggcaggagcagacgttattgcggctaaaaataatgtaacaggcaagattgctgaagttgcgaagaaagaaccggatgaaaccaaacttgcacagcgtaaagcaacggcactgccagatccgaaaataggttctaaagtaaatataaaagcatctgaagcaatgcctgctaagagaggagactccgaactcagcctgccgattgctaaaagttacaggtctgttgaacagcagtttgccaaaaaccagatcacggatgagcagttggcaaaatccaacgaaccggatttcatcaatgcccttaatgctaaaaaagctgctaaagacaacgcggaaaaagctccaaaagaatttaaaaatgaagaaaacaaaaagctggaagcctctaaacgcgaagctcagggcaaaaccaacagcacgatggagggaatgcaccaaagcagaaaaggactgctggatagtgtaactaacaagcagcataaagccggtgagaaaaataccgccaaacatcaggatgttgtggataagctgaatgctatttatgcagagactaaaaaatcggttgacggacaattggatgatctggaaagtaaagttacacagttgttcgatgcaggagctaaagatgccaaatctgcatttgaaaggtatgttactaaaaaaatagaagactataaagatgaaagatacggcagttggtatagagcggataagtatggaaaccgtttggaagacgcctggaatagaaaattaccagatgaggtaaatatatttttcgttgaaggacgaaagatatttcttcaaaggttagacggtattattgatactattgccaatttagtaacctcacgattgaatgccgcaaaagcttccattgcttccggacgccagaaagtcgttacctttattaaaaatcttcctgcggatgtaaaaaaagccattaaaggagatattgatgcaattcagggacagtttaaagaacttgaaaattcgatcagtgaaaaagaatcttcattaatcgattctttggcaacgaagtacaatgatgcactgaaagaagtggatgaactgattgttgatattaagaaccgtaaccgaggattcatcgcagctgcagaagatgcaacggtgggagtggcaaaaacgatcatggaaatccgaaaaacacttacagagttgctttccggagcggtaagtgcagtcatggcaattgttgcagacccgataggatttttatccaatcttattgccggagtttcgcaaggatttactaatttcggaaaaaacatctggacacatcttaagaccggtttcttcggatggctgaccggagcaatgaaaaatatttctttcactttgccggaagatatattctctttgaaaggtattttctccatcagtacccagatgctgggattaacatgggataatatcagaggaattggagcttcagtagttggagagcctgcaatgaaggtacttgaagtaagtttcaaaatggtacagattgttcagaaagatggttttgccggactttgggaacatgtgaaagaccagtttgcagatcttaaagctacggtgatggataccattatcgatatcattaaaacagaggcaatacaggcaggaattaagtttattttgggcttgcttactccggcaggagcgtttgtaaaagcggcaatgatgattatcgatctggtgaaattctttatccagaaggcagcacagatcatggagctggtaaaagccattacagaaggtattaaagcgattgccagcggaaatgtagcagcggtagcgaaggcgatagaaaatgcattgggaagagcaatcccagtcgtgattggttttctggcttccttggcaggtcttggcggattggtagataaagttatcggtgtagtaagaaaaataagacagcgtattaataatgccattgtgaagttctggaactttgtgaaagggaaggctaaaggattgcttgggaagattggttttggtgataaaaaagagaagaagaaaaaaggagaagatcttcgtagtactgaggaaaagaaaagggatttagatgaagggataagagaaggtgtaaaattattaaaagatgatagtttaactccgaaagagagagataaacgtttagaaaatataaaacaaacttatgaactaaaagagttaaaaattgttacggaaaaagtagacaagactggaaagtgggtttatatatttggcgagattaatccaagcggaaaaagtacggtattaagaatggcagatggtgaagaaatagaactaagagatgatcaggcggccatagtgagggatagtaatagacgccattttagagctatcttaccaaacaaaataatgtttgatcttaaggcaacaggtgataaaataaaaataagattgaaagatatagaagtctttgatgtaggtcctgctaggaaaagaggtgaagatggatacgaatatttttcagaaaattatattatagtaaatgttaatagagctgctgttaagaacttatataatgcagcagaatcggaacgtgctgaatatcaagcggcttatcaaaaaaaaggatatgaacttggtataagagattgttttaaatttgccttggatatattaaataatagattaaatggagatttaaaacgtgaacctgaaggatatgataatgatgatagatttgatgatttaataagttataaagaagaaaaagagcgaactacaaaaggcagaaaaagaagataaaaactatgacaaatttcataaaaaaactagaaaaaaattttgatattcaaataattcattctaagaaacatatttgggaaaattattttgatacagatgatgatggaaatattacaacactttatttagatgaggttgatttaaataaacttgaagtacttctacccatagcagacagtttgattaatcttgctgttgttaaatgcaatatcaaaactataggagctttaaaatcgtttagccgtttagaatcattaagcttaagacttaatagtttgcacggatccacattaagtcatttaagccatctgaaaaaccttaaacgattggatttatgtggaacaaacattcaggatacatcgccacttggcagcgttactcatttgcaggaattgtatattggtagcagtagccgcctttacgaagtgaatggtttagaaggtttaaaatctttacagcatttagatacatcttacagtagaattgatagcattgagaaggttagagtaaatgaaaatattcaatcattaaatttagaaggaactaaaataaaaaagatattgcatttagagaggttttctaatttgcaaagccttaacctggaaagtactttagtggaaaaaattgaaggattggatacattaaaaaaacttaaagagttctttatatctacataccgcataaagcgtattgaaggtttggaaaatttaactggattagaagttttagatttaaattttaataaaatatcaaaaatagaaggattggataatctaaccaatttgaaacgattgagccttaatgaaaatcaaataaatagagttgaaaatttggacaatcttgtaaatcttgaacttttattgctagagcctaataatactgtcacatattttgatacatctttttttcataatttagtttcagaatgtcatatttacatacgcgatattaaagatattgacgtgattcaagacgcagcacctaataatgttaagattaattttgataatgattatccttatcctacaacactgtatcgccgtccgacaggaatttttgaataattttgtctataataccatttgaaagatcagtccctaaaaagcctctaaaggaaaatttcaattagaaattttccttttttattttatcttatctttaaacttttaagcgaagaaatttcaaaataaccatgacagatttcataaaaaaactagaaaaagagtttaatactcaaattattcattccgaaaaacacatctgggaaaattattatgatgtggataaagatggaaagattaaaacattatttttacgttatgttgatttaaatgaacttgatgtattattgcctatagcggaaagtttggttaatttagctgttatcgattgtaaaattaaaaccttaagagggttaaaatcgtttacccaattagaagtactaagcttgcgtctgaataatttgcatagttctacaatgggacatttaaaacatttgaaaaatctaagaaagctggatttaagaggtgtcaatcttaaagatacttcatatcttggatatctaacgaatctggagatgttattcattggtggtagtgaccgtctctatgaagtaaaaggcttggaaggtttaagatctttatatcatttggatgcgtcttattgtagaattaataatattaagaacatctgcgcaaatgaaaatattcgttcattaaaattagaaggaactaaaataaaaaagataacacatctggagcgatttcctaatttagaaagttttaatgtagattgtacttcagtagaaaaaattgaaggattagaaaattctaaaaatcttaaaaaactttttatttctacgtggaggataaagcgtatcgaaggcttggaaaacttatcgaaattggaggttttggacttaaatttgaacgaaatttcaaaaatagaaggattagataatttaaccaatttaaaatggttgaatcttaatgaaaatcatataaccaaagttgagaatttggataatctgataaatcttgaacttttattattggaagccaataagccaattacttattttgatacaatgtttttcaataatttagtttcagactgttacatatatatgcgtggtgagaaagacattgaaaaaattcaatctggagcacctgaaaatgtgaagattaattatgacgacaaacatcgttggcctacgtcattgtatcgtggtccgattgatgtttttagataaacttcgtttataatagttttgaaagatcaatatctgaaaaacttttaaaagggaaatttcaattagaaattttccttttttattttatctttaaacttttaagcgaagaaattttaaaataaccatgacagattttataaaaaaactggaaaaagaggttgatactcaaattattcgttccaaagaacacatctgggaaaattattatgatgtagatgaagatgggaatattaaaacattatatttaaataaggttgatttaaaggatattgatgtattattaccaatagcagacagtcttgttaaattagcccttccatactgcaatgtgaaaatgttacgtccattaaatgctttttcacggctagaaacattagatttaaccggaaataaattaccggaaaaatcatttaggtatttaggagatttaaaaagtctgagaaatctggatttgggagcaactggacttaaagacacttctttgttggacgatttaattaatttggaaatattatatatcagttgcaatccgtatctcgaagtaaatggtttggaacatttaaagttcctacagcggttagatgtcactctgactgaaattgatcatataaaaaaaataaatgttaatgaaaatatccgttctttaaatattggagaaactaaaattaaaagaataaccgatctggatcgtttttcctatttggaagaattgagagtaaacggaagtcgggtagacaaaattgaaggcttggataccttacacaatctcaaacaactacttatttcgtgtactcatgtagaagaaattaaaggcttagaaggtttgacaaatttagaagtattagacttaagccataatgaaatttcaaaaatcaaaggattggataatctgaaaaacttaagggaactaaatttaaatgaaaataagatcaccaaagttgagaatttagatcatctcataaatcttgagtatttaatttttgaggcgaatgaaattaaagagtttgatacgtcttttttatctaatttggtttccgaatgttttatttctctatgttttacagggaattatatcaaagagattaaagatgttccaaagaatgttaccattaaatttgaggcggatcattttgtaccaagagtatttcctatttcaaatgatttgtttatataataaaaagaaactgtctcaaaaatgaggcagtttctttttttacacccgggtttttcatttctaatttttcttctttttaatttttgatagctcaataaaagttttcatgctcgttttcctttcggatgctttttcatctattaatatgagcgtcttattttttcttttgaaaaaacagtgaaattcccaccgtcaaataaaagcttcttaagctatacaaaatttacgacttactgcaactacagaatgcaggaggctaaaaactttaataagaagaaaaaaataaggaattttgaaccctcaagtacagatactattggatccaaatcagctgtgctaaaaacttagaaaagttaaaaaattaagtatggaaaaaaatgaatcaacaacaaaagaaattctaaaattctattttgagaccggaaagaaacctaccgaagctcagttctcagaatttttagattcttactggcataaaaaggaaagcattcctaaagaaaaaattgaagggttagaaaatctgtcgttagactttgatcttctttggtcacccaccagcaaaaaactgtctttggcagatgctcagggaaatatattgtcggaaatttctttgcaggctctggacaatgaagggacagatttaaggtataatacggctacagcgtcattggaactttataatgcagacaatgagcttttagacagcattccggtctctgattttgtaaataatgtaggaacgcaactggctttaaattccaacattttacagttaaaagacagcaaaggaaacgtattgtctaatgtaatgtttgcagtttctaacattggaggattgcaaaccgcattagatgctaaagcagaaaaaacagtagctatcaatactgtttctccgttacagggaggaggcaatttatcgtctgacagaacattaagcatatctcagtctaatacgaatacttcaggttatctgagtaatacagactggaatacatttaataataaattcgataaaccttcgatggcagccaattatctcggaaaatggaacggctcaacatttatcaacagtttattacaggataacggaaccagttcaggaatcgggagtaacaattacaacaatatcatctggtctgtcgactcttcttctaaagcggcgcttatcgcaccaagaatgactcaggctcaaaggcttgctatttctttaggaaccatacaggcgggagctattgtttatcagaccgatgctattgctggatattatctctggaacggaagttcgtggggaactttgggaagtaatattgctaccgcagatcttaccaatactcaggcaagaactttcactcagaatgcagattttacatggaatactttaggaaatgcttattttttgaaaggactgaaggatgtaggcagtgattacaaagaccatcccaaagttttaagaatagactcaaacacaaaacaggttgtagaaggtgatgctctggtggtaacaataccggatactttacctaatcctgttacaccaacatcacaaactttaaatatagttcacacttacacaaacagtcctaccgcattagataccaatgtaaaggatttaaatgaatttatcatgaatatagggaatttaaaatttacacatttaactgtagacgattggaatttaattaatgcttctaataatacagcatcaagtctatctgcaaatggaatagttctaaaaacaaacaatagtaattttggtacattttcgacagatgaaataatggcttgtgcttatcctaatttgattttaccatctaataaaaactgggtttttgttataggtggtagcattggaaatgaatcatatgagggaaacagaggaataataggtatggcttcttctgatgcaacttctaatataggtattattgacagtttcatatcctattttacgacaggtgttaattggaatggatatcataactcaataaattttgctccggtagcatataatcaaaattacaatacaatcgccagaagtgtaaataataccatcatctttacaaaagtagggaatatattaaacattacagttagaagtggtagtgatgttaagacaatgaatacagatataactggagtaggtacaatgaaacctctttgttctattaaaagaggttcatactctaatcttaatatttgtagtactgattttggaaaatactggatcgaatcttaaaaatatagaaaataagctttcacaaaactaaaaaacatcatattagaaatccagacaaaaaatataaaattatggaaaagaataaattagctaccagagagcagctaaaaatctactttgaaaaaaataaatatcctactcaaagtcagtttgcagaattaattgatgcatttaaacatagagaagatatcccgacaaataaagaagcggtaattttagctaatagtttggcatcaattgataacgcatatttagcatatcatggatacaatttcggaaaagaaaaaattttgctaacagttaattctcaagatgaaggagagcaactaattgatgttagtaaaacgaataattatcaggaacaaagaaagtacttttttggtactgctccttactcagttagaataaaaaagtttcagttggatgaacttgccgaaacagaatactattatttcaactaccagattaatcctaactctaattctagcttcactgtggaaagaattataggaaataatttgcaggtattacctgaaggatttgatttaggaacttttaatgacaaaattattttgacgttctccaaaatagattttggtcagaaaataaacatcattaataccaatatcaaatttattaataatactaatgtaaatattatgtatagagctcatgcaacttattggggaagtttgttttcaaatggagacagtgttactaatcactataatttatgggataatctttattttttctataaagctgatctcaaagaaattaatcaacatattgaatgtaaagtttacaatgtagacaataatcagcttataatgacgggatacttgtatgcaggagaaaataatgaaaatggttggggtggtgatgtggcaatgggaatcagaaatataagaattgaatgtaattatcaaaatcaagactaatgaaattaaaaatatttgaacaaaaccagcatcttaaagatcttacgccttttgaactaatggcaaaagatatcaccattctaaatggaatcgttaaaggggaacctagttatgaaaaaggaagaaaagccgttgccggttactatttagacaaggaacaggcgagtctggcaattcagaaaatcttttcagatgaactggatgaaaacggatttttaaaaggattaaatatcctcattaaatggttcgatatctatgaaaatcctgtgcttattaaacgtgtgtatgtacctctttctgtttcagaaagtgcagaattggttattaaaagacgcaagcgaattattgactatcttaaagaatccggcgtaagattaggcgtaaaacaacatattgattcccttttcagctattactcaaattatcagcaatccggaattacaaaaaatcttttaaacagcttcatcgaaaacggaacagaggaattaaaagacgcggttcttaatgaaaacaatgaggaaatcgtagggattcttaatcatattttacctaccggaactaccattaaagagtcattattggatccaatttcataacgtaaaaaccattatatcaattgtagaattttaggcttagatttttataatctaagtcttttaagatcaactcaaacaattttaaaaatacgaattgccactctgctgcaactacagaaactgtcatccaaaaagcaaggatttctccctgaaaaaggtgaattttgaggtttaaaatgacaaaaatgcaaccaacacaactacaacatttattcatccatttagaaagcgttattacttggcgtcttaatcatccggaagatgatttcactactgctcccgaatttaatccatacgattacaaaaactttcatttgggaaattatatttcagaaaaacagcttacccatcaggaaattgttattcttttaatggctttgctgccaagattggatcctgctttactgaaaagagtttatcttgaatttccgtccagtccgttatttgatttctgtttggttaacgacaatggcagactttttaatcctacagttcaggctgttcagtacattcttggcggagaaagcatttccgaacgattaaaagcgctggactactttgcccagacttcattattagtaaaagaagaacttcttgttttttcaggctcttcaaaggaaaacttttcagtaaacagtctgttgagcgttcctcaggatgcttttgaggctttaatgttcggagcagaactgcttcctaaaatgagtaacgatttcccggcagaacagcttcatacaagcagaacatgggaagatttaatccttcctcaggatactttggatgagcttcaggggattgaagcgtggtacaacagcagcagaattcttatggaagactggggaatgcagaaaaaacttaaaccgggtttcagagtactgttttacggagatccgggaacaggaaaaacccttgctgcaagtcttttagggaaatatacgaaaagacctgttttcagagtggatgtttccatgctcgtttccaaatatattggtgaaacagaaaaacagctcgccaaattatttgataaagcggaaaacaaaaactggatcctgttttttgatgaggcagatgctattttcgggaaaagaaccagtgttcgtgatgcgcatgacaaatatgccaatcaggaagtttcttatctgttacagagaatagaaactttttcaggacttattattctggcttccaattttaaaaataatatggataaagcctttacgagacgtttccatagctgtataaaattcaataatcccggatatgaagaacgtctgcgcatttggcagcacaatctgccgcagcaattagatcttggagatattaatctggagcagatttccagaagatatgaacttacaggatccaatatcatgaacatcattcaggatgtttgcttaaaagtaatttcatcggaagagcctggttacagagtaaattcagaaatactgctggaaagtatcaggaaagaatatttaaaagaggataaaatattctcttaacaaaattgaactttaaataccaacatcatgaatgcaaaacatttactgctgattgccttaatgagcatcgtgtctggctgtagaactaaaaataaagtgatcactaattatgaagaaaaaaagcaggaatcagaactggtaaaaatagattccctgagttcacaaaatcaacagtcagtaaagaatgcttcttcagaaacactttcagacgacagaaaagacgaaaaatccggagatgtatttattcatggaacatccgatcaatccagtccttttgtttatcataatattgtagggaaagatactcttcaaagtatttcaattgtagggaatgcagaatatatcatcaatacccattatgcaaaatcggacaacaaaatttctgagacaaaaaaagaacagtcagtaactcttctgcggaataatgatcgaaaagttatttccagagaaactcaaaaagagtctgatcttacaatttctgcacaaacaaaaaaaataaaggtgaccggatttcaggcgggagcatggatcgtaattaccattattgcaggaattttaatattggcatttttcacctacaaatattttaaaaaatgaaaacatcaccaaaaggaatacagctcattttatcattcgaaggtttcagtgcaaaaccttatctggattctgccggaattccgacaatcgggtacggaaatacctattatcccggagggaaaaaagtgacgatgaaagatccgccgataacaaaggaaaaaggagcagaattgtttgcatcagttttaccgacgtatgaaaaaatcgtgtccggaaaaattaaaattccccttacacaaaatcagttcgacgcgcttgtttcgcacacctacaacacaggaggttccgatacattattttcgttaatcaataaaaaagcagatcctgaatccatcagaaactggtttgttacaaaatacacaacagcgggcggaaaagttctcgcaggtttggtgagaagaagaaaagctgaggcggatttgttttttgggaagtaaataaaggttaggattgaacatatgttcattagaagattgtctttcaggcaatcttttttttttatactagaatatcgaaaccaaagccaaagtcttatattttagtcaataattcatcatatttacattatgttgtaggcatcgtttttaaagaatttcaagttttaatttcataatttttcaaaattaaaatttttagcatagcatttgtataacaaatcttatctgatcgttcagatagaaatcataaaattttatttataaagtgtagagatttgtcagttgagttgatgttctgttctatcattttaagtttctaatgacgttggatgacgtgaaaatgagtattattcaatacaatagcgtaaccaccaaatgacaaaattgaataccaaaaacagctcagatgccgccttgtgtattttgataaggaaaaaccggcagcagggatttgagaaactctacaaaagctatggctgtatattgtatggtcttgctctgaaatcggtttcctccaaagaactggcagaagaaatcgtacagcgaacttttctgaatgttctgaaaaagatagattttttttcggatcagaaatattccttccacatctggatgatccagaatcttattgcagccattaaagaactccttaccgaaaaacatatcgaatacaattttactttacatcagtttccggaattcagtttcgagctgaagcatcatatttctccttattcctttccttcttcttcccaatccgagatcagcagtttatgattttctgaaaaatatttagccttaatcaaaaactgtggtatccgttattttaatatcaggatttattttaagtttttggcagacaaattgttacagattagaaatcaattaaagaaatatcccgaaaatcaaaccacaaatataatatcattatgaaaaattcaatcttaagtattcttgccatcgcagcaatggtagcgtgtaaaaaaaatgaaacgacaaatgtagatacttctacagacagcacagcaatgacggctcctgctgattccggaatgatgaacaacgattctgctacaactgcagcgcaacctgcggtaaacgcctctgcttctctcagcgatcaggacaaaatgtttgccgatgccgctgcaaaaggcggaatgatggaagtgatgttgggaaaactggctgcaaccaatgctgaaagtgctactgtaaaatctttgggagaaatgatggtgagtaatcacaccaaagctaatgaagaactgaaaaaatgggcaatgacggtaggttatactttaccgactgctatggatgccgatcaacagaaaatgtatgacgatctgaaagccaaaaaaggaaaagattttgataaagcgtatgcaaatcttatggtaagcgatcataaagaagatattgcggcatttaaaaaagaagcttcggcaggttctgaggcatcattaaaatcttttgcaagcgcaacgcttccaacgctggaacatcatttgatggaatccgaaaaagcgatgatggctgttaaataggaaagatcaaaaaagaacttttaagaagatcctcagaatctgtaaaatgattttgaggatatttttatttgaatgtttgaaaaggaaaatttcgattatttaaatttactatgatcctgctcataatgatttaatatccagatttttaaatttgtaaataatcacaaagaaagaagtatgaagccgaaacagattccgggagttccgatccagaagaaaggcggattccacgatacagaaagtaccaaacagtgtaagattttagaaatcaattcaaaatttgctgttcttaaagagcgttttttctccatcaatcgctggaaagaatactgtggtaaagcttctgctgattttaaacattttgatgcttccggaaacgttgcagaccgaattcccagaaaaggcgattttataagaatttccattccgggtcccggaacggtggaagctaaaggatatgattgggtggagatcatcaatatttctcacagagatacagacagacatgaatcgtatctgatgatgtgcagaccttccaaacagcccaataagctgaaaagtcatattgcccatttttatactcctgcagcaacatccaatatgctgatttccagagaaggtaatattttaaaagccgcaatctacggcaggaacgaaagtcctaatttcaatgcgtctttttgggataaagtaagaaatttttttattgctttaggcggaattttcggattcggtaaaatgcagtggaagattctcacggacggattacttgattttgattaaaattattgatacacttgttttttcacccattttacttttctattgaactcctcaaaagcttgaggagttttggtttaatatgttttgaagataaatttagaatcagtacagtttttttctaagatttttaaaccacaattccgtagtttcttccgccggaatattcagtttggttctcaggttatgctttcggtttcgtacagtactcacagttcggaatgtatagcctgcaatatcttttgtgttaaaacccaaatagatgaaagcgcataaggtgagttctgagacccttaatttgggatcaatcttcagcagttcattcacaacttcaggataaacctcctgaaaacgggtgaaaaattctggactgttgcttttggcaagctcgatgatatcctcaaaagattcatttaccttttgctgaagctgcagattttcttcctcttttgtatttatcagtgcaatattttctctttttcgggcattatgtttttttaaagtgtaaagatatatcgttataaataagagaatggtcaaagcaatgaaaaaatacagtttggtgtacgttttctgattgctgatttctttttcctgaatgattttttttacggggaaatcctgtattttttgtttttcaacagaaagactgtcgttaatcgtggtatatttttctaaactttcagtagctttatctggctgattcatcagtttataagcatccgccaaaagtctgtgggtatcttttatatcttgaggtttgttcagctttttggaaatttcaagagatttttcaaaataggaaactgcatttttataatctcccttttctaaataatatcttccccagttacggtctaagattgatctttcgaatgaggttatttttttagaaagatcgaatttttctcccagatccaaatagaattttgtagaatctgtattttttttgaatgatgtaaaatatttggcgagccttgaagcggtgtatgctgaaggatttgcttcgtgggctttaaaaagatccgaatacattttggagtaatttttttgctcttcataaacaacggaacgcagactgtaacaatactccagattgggcttgctgttgctttttttcgcggcatctatagctttttggtaatattccagagccagtgcataaaatccgagatttttataatttcttccatattcagcgtttatttttgtgaaaacatcgtcattattcaatgcttcatttttttttgaagcaatatccagaaaagcaagactttcctttgttttataaaggttactcgatacattggctgcaataatgtaggtttttagagctttctcttcgtctttcagccgttcatatcctgaaattaattctctgcatacaaccaaagattcgttcagttttccttcagaacgcattaccaaaagacggctgaaaagggaatcaagttgctttttggacttttgaaccaaaacaaaatttgaaaagagtaaaatgactaaaaaaaataatgctttatttgaattcataaattagtacaatcatcacaaaataaaattacttaaaattaacagtattcagttataatttaaaaaaaagacagattattaaacctgtcctttccggatattcctttaaatagatttgattttcgtgaatacagaaaaacgtaaagtacatttttctttttttttcagacagaatttttatccatttctcagaaaataattttctttaaaacataaaaaaaacttcttataaaaaacaaaactttcttcggaaatgaaaaaagttttgcaacgtgattattggattcatttgtgatttacctccttttttgttgtttgcaaagaaaaataatcttttgtgatagctcaaaaaaaataggcatctattctgtatctatttgctataatgttttgaaaatcagtttttatttttttgttttacgaaactttttttaaatcagattctttttttcgtaaagtttccatttgtaaattgtatttctgcttatcttaaattgaagggaagtttcaatattattcagattattttttttctggtattctataattttttttatatcagacctcttataggatttgtgcttttgattttcgtcttttttctgaacttctttcccgaaaataattgtgttgaggttgatgatatcaaaacttgacaatgttttttttctgagaattttttcacattctttacgtttttctggatgttttttctccagaatatctgaaaatataagtttataattgggctggatttccttcataattatgggcttttttatttaagaattgaatctatttattaatcttttcatatttattaatccatttgtataaagtggttttaggaatgccgtatttttcgataacctgacttctgctaagctctccggaattgatctgatccagaataaaatctataatttctttggtatagatgtttttacgaaaagaaggaaggctggatctctgggttgttttttttatcagattcaatgcggaggtaggtggagagtacaggattaaatgttggctgtaaatcctgaagaaatcgtattccagaagtttgcaccatttcaaaatggtaattgcatctatgctttctgaagtcagcatttcttcaatttcattttctgtcttacccataaaattgcaaattcttgtaagatctatattcgtctcaataatcctctgattgatgagcgagccaatatgaatatttttaaagttcaagttttgttaatttttaatttaatgaccaaaataagagcaatatttttatatagtgaaaaaaataccgatctatcaggattctacatttttatatgaatgttttttaaatgtatgtttgctctcttatttgtaaaattccgctttaatagtagctaaaacgtacttttatttaattataaaaaatactggatttattcttaaggcttccaaaacgtccatttctgcccgttgaaaataatcagtcggtgtttcgttgcatctgttggatgtttaagaaatgccatcattcccggagacgggtttttaatattggtaaaattggagactattggtaaaaccaatgctttatttggggaatccaataccagaacaccgtccgtagatgtgcctgaatttccgataattgcccttgctccgttgaaatcatttaaaggtaatgcctgtggtgtttttactgtattttctattacggtagagtagccggaacgaacgcttagatctgtccagcctgtattttcatttttaacttttattttatactctgtatttgaagaaacatcaaaaataaaggttcctcctttagaattattggttcctgaaggtaaggtttctgtataaggaagaataatacctttgtcgttatctgtcccgaattctaaaagaacggaagtgctgctgacatttcctacagaatttgcagatcctattcttacctgcgaaaaaacttttccaaatatgaaaacgaataatataattgcggtctttttcattgtttaaaatttaaattaataaaaacgataataaaagcaaccggataaatcatcatttaaacggttgcaaaaaatgagtgaattaaggacaaccttgtgtgctgaaacatttccatccttcgccggctccggctcccatataaattttcatgcatcctgcacctgcattttcatcggtatcgaaaaccatcattccgacaaccggaatggcaatcgtagtttccggactggagtttcttgtaatgacgaaaccttttgttttggcttctagtgcagtatacgctgaatttctgatcatcggccagcttgcattgcttcctccggctctgcccaaaactgtaattccctgctttacaggataagtttgtcccgctactaaagtcggatcttcatagcaaatacatccttttaccattgtattctgagaacttcctatgctttgtcccgttgcattgctatatcctgtaggcaatgatgaaaattgcggaaggccaatattaattcctgttgtgcttacacatgttgcagaagcacagagattttggtttatggttgtgctgcctccgctgagtgatcctcctgctgtaaccagttcagaattggcaatatcagctcctccttcgcctgcatcagaacagccgtctgcatcggagtccaaatctaaataatccggaataccgtcgccatcagtatcactacatgagtttattactacagatcccattccgagatctcttacctgagaaccgtcactgttagctgtaaaagtaaataccaaatcccctgaaacgggagtgccgtttggtaaagcaataataagattgctgttcgcggattttgtagagtttgatgttactaacggaagggaagctatatttacagatgctccgttattagctgtaactacaggcgatgttgtattattaacagtagcggatgaaattgttgcgtaaactgttcctgcatacgaaactgtgaaggtaaaacctcctgtattattaccttgtgtggttctaaaccaatataaattgttcagattgataaaagtagtaccgaaaacactggataggtttcttgataaagtagttgtagttcctgcatctcttctaaattcaagaccattggtgttaagattaactcttcccgtacctgaaccccaagtaccaccatatgtaccatcaacagtccagtcaggtactgtatctgtattaccacctgtagttggaaaagtactattaagaatggtgcttccgctgcattctgctgtatccaaaattccatcgttatcatcgtctacatcggtactgtctggaattccgtctccatcagaatctggatttactgttgctgttgaagaattatttgcggaaacaggatcagcctgtgtagatgttccgctaattgtagccgtgttagaataatttcctcctgcttttacagttgctgtaatggtaagtgttgcattagctccgttggttaggtttccaatagtccagttcggagctgtccaagttcctgtagaagttgtggcgtttacgaaagtataaccggaaggtaaaatatcatttactacaacattacttgcggaatccggacctacattacttgcggtaatggtaaagattacattgcttcctactcctgctgttggactgtttactgtttttgttacggctaaatctgcaattattgccgcagctccaaattctgaagtatttccattagcatcaatagctattgctactaatttatcacctgatgaaaatgtagctcctgaaacaaacgttaacgtctgattactaaaagcatttgcaactcctgtaatgcttcctaaatattgaactccctcaccatgactggttactctggtacagactccacctgtaatggctccattttggtcgccatcatcagcaactttataaaactgaatggttttatttcctgcaatagtagctcctgctgtagactcatttccattacaaatgcttatatatcctgaaacatccagagttgtagcagatgtaatgctataaccagtaattacaggataatccagtaataaattaggctgattggctgttgtcacaccatcattgggtgatacgccataatcattcgcagttccgttccaacttgccagatctataggtaatcccgtattattataaaaaacatttctcgaaatcctgttgttggatgcattggcagcaacactactgctattggtaatcatcacaccgccacgtatcgttgctccggatttatatccattattggcaataatattagcttcaatatcatcccttgtgttatcatcattagatcctataatattattgttagccccatttccatttgagtttacatacactcctgcatttccgtttcctaaagcggttgttccgtttgctcctacacctatataatttcctgcaacaatattattacttactgcaaagttattggatgctaaataaactccggctccgttaagatttccggaaattatatttcgttcggacgcatcttcaacaccatcactgtcggttcctatcctacaatttgtaacactgtttaagcttactccggctccggtactaaaagttagtgctgtactatatgttccgtttggtaatgctgtatttcctgtggcatcaactcctatataattacctgcgacgacaatattatttgtccttgtagctaaagttgcacctgcaagagtagcagcaacaacagctctgccaccattaccagaaattacatttcttacaaaaggcgcgtcaacatcagtatgaattctgtcgtcaaaacctataacaatattattaggtgcaaataatcctgctctttgctgaatattaattgcgggataaaaaccatctctagtagcatttggttttgccacagtacctgtataatcggttcctatatagttacctgcgatgttgattccgcttccactttctatagcaataccataattagtacctcctgaaataatatttctttcagcttcatcagagattccgttagcatcagttccaattacaacattagttccagttgttccgataaatgatattggcattccttcagcagcaggtacgttttgtccgattggcgaaactgttgtgccatctggcaaaagtccgaaatagttacctgctactttgctgttgtttaatgttaaacccacatctccataaaaaaatattccgttaacactaccgccagcaacagcatcacgataagtgttggcaataacattgccttcattagcgtcatttgtaccaccatttgatcctccatcaccgttagttccgataattagattggaaatagttgcagttgcagaagtcgagccaaagaacagagctgatgattctaatctggtatcggctggattagcactaacgctgccgtttccaagcaatccaaaatagtttccccaaatatgcaatccattaatattcgccggtacgaaaatacaagctcctttggtattatacattgccaaaccactgatggaagatccgtctgacccgccaacaaacgcaaacatatgggaggtaatatcatttccattaatctgaattctgatactgcgactacttgatggttctaaaggaccttgaactgcagaggctgccgtatatcctcgaatacttacttgccctgtaatatcaggtagagatgatgttaaagtaattgtatgagtcccggttcctaatccactaaaagtaatgatatcagctccgggattcgaattagcttgtgtaatgcagtatcttaaggttcttactgttgaggaaccagttccgtctccattgttatttacatcataagtcgctgctttcaggctgtttatgttgcttaaaagcaataacatcaaaaataaagcaaagctgaatttttgatgttttctataaaaaattgtaaagaatttcattattttaaaaattttatttattggttatagtcaccaaaatatttcatcaaattgtttttcatttatattgaaagaataggaggaggtcttacagaaaaacatacgttggctggttgagagaaaaaatgaaaaatttttgattttaaaatttttacttcactgtaatcataatcttggtttacaataaattttgttacatctatgtctataactttaaaaacctgtgtagatgttaaagcgtaattttgtctctttatggtttgaaagttattgtttgtattggggaaatctttaaaatttacctcggtagattctttcttttctattttttttccagctgtacttttatttgccgaatcatattttcctgaaatacttttatgttttgttcttctttccctaagactttttttactgtttttttcagacaaaattttaacagataatttttgatctatcggaacagttgttataactgagtcgaataatgattctttttctgcataaatatatgttccttctgatacgaaaatctgagaaggacagaactgaacaaacagtactataaaaacagtaaaaacttttttaaaatgaaaaaagttttttgcagatggataaataaattgggacaattggaactgattatgttttctggttcaaaggaacgcaaacaaacctgtttaaacacaaaaacagcctatctattgtgtatctattttattttaaagtattgatttttaattgtttattttttttttaaattaatataattaagattttgtctttctgttttgtttttgtctttttgaaaaattgaattggagtttttctgaactgtttcaggagataaacaatgcagaattgagatgttttacatcgggaattttggggttggaaataaataaggcattctgaaattttcagaacgcctttcataagtttagtgttttcaattgttgtttctagaaaatctcagaagcaaacattttcttgttgaggtgtgcaatatgagctttcagaaaagcatgaagtttaggattttctataatggaatcggaaaatgtagggacgatcatagacttattggaaacaatgttctgcattattgcgtattcttcgccgaaaaagatttcaagtccgaattccttttttacacaggaatgcagataatcattaatataatttttagagtcaacagaaactgttttttccgcatcagaatcatttttcatacccagatcttataatttttaaaggtaataaaaaatatttaagtgtataaatatttattagtttaaattaaatagtatatttgtatactaatttttacaaaatggaatattctttgattaaagacataataggattattagaagaatttgaagcagaaaattccggaaatttatattctaaagatattgatggatttaaatcctggatatctgataaagaatcttctaaaaataagaataaggagacagaaccctactgggaaggaaaagagaatggaagaagtcctgaaagtgcaattaatacccttttggttcatctcaacagatatgcaaaaacttattctaaatctgcaattgcggattccgaattttctacgcaggaagaatttatatatctgattaatctgagagcttttggaagaatgaccaaaactgagctgattaaaaaaaatattcaggaaaaacctgcgggaatgctcattattacaagattattaaaacagggatggatcgagcagaccgaatctgatgatgataagcgaagtaagtacattagcatctcagaaaaagggatactggctttggaaaaacaaatggagaagatccgtactgctacaaatattgttgcaggaaacctaaatcatacagaaaaaatggaacttatacgtattctgaacaaacttgatcgttttcatcatccgatattttccagaaatatcgacagcaaagatcttatcaacacggtttatcaggaatacacattcaaaaactaaaactatgagcaaaaaagtagcaattatcggttcaggattttccggcttgtcggcagcttcctatttatccaaagacggatacgaagttcatgttttcgaaaaaaacagtggagtgggaggaagagccagacaatttacaacggataatggttacgtatttgatatgggaccaagctggtattggatgcccgatattatcgaagctttttttaacgatttcggaagaaaatcttcagatttttatgatcttattcctctgaatcctcagtttgaaatggtattttcagacggagtaatgggaattccggaaagctatgaagagatgaaaaaccttttcgaaagcattgaaaaaggagcaggaaagcaacttgacgagtttatgaacgacgcacagtacaaatatgaagtcggcatgaaagattttgttaataaaccctgccattcatggtttgaatttgtttctccaaaaattgcaaaaagtgctttaaaattagatttactgactaattttcaacgctttgtaagaaaatatttcaaaaatcctaagcttattatgctgatggaatttcccgtaatattcttgggagcagcaccaaaagatattcccgctttgtatagtctgatgaattacggcggttataagctgggaacatggtatccgatgggcggatttgctaaagttactcaggcaatgatgcagatcgcttccgaaaacggagtgcattttcattttaattccaatgtcgagaaaattattctggaaaacaataaagcggtcggtctgaaaataagcggtgaggaattaagattcgacacagtcatagcttcatcagattatcagcataccgaaactttacttccggaatctcacagaaattatgacgaaaaatattgggaaaagagggtatttgctccttcatgtcttatctattatttaggttttaacgaaaagattcctaatcttacgcaccacactttattttttgaaaacgatcttgaacttcatacaaacgaaatttacgaagataaaaaatggcctaccaaaccattgttctacgcttgttgcccttcaaaaacagataaagatacagcaccggaaaacggagaaaacgtatttcttttgatgcctgttgcgccgggaattgaagattctgaagagatgagagaaaaatatttccttgaaatgatctcaagactggaaaaacataccggaacttcagatcttattgctaaattagagtacaaaagaagttattgcgtagaagattttaaaaaagattataatgcatacaaaggcaatgcgtatggtcttgccaacaccttatcacaaactgcagttttaaaaccttctgtaaaaaacagaaaagttaaaaaccttctttatacaggtcagctaacggttccgggacccggtgttccgccgtccattatatcaggtaaaatagtcgccagagaagcaattaaattgaattaactatgaaaaaactttttgatgacctgtcttataaaatcagcagggaaacaaccagacagtacagcaccagtttttctttaggaattatggcgctttctccgaaaatccgaaatccaatctatgccatctacggttatgtgcgtttagccgatgaaatcgtagacagttttcacgatcacgataagcagaaacttctttcaaaatataaagaagagacattctgtgctttggaagataaaatttctctgaatccggtgcttcattcttttcaggaaaccgttcatcaatataaaatcgatcatgcgctgattcatcagtttctgaaaagtatggaaatggatctccagaagattgattataattcagatttatacaaagaatatattctgggttctgcagaagtggtaggattaatgtgtcttcatatttttacagaaggaaatattgatgaatttgaaaggctgaaaccatatgccatgactttaggatcggcttttcagaaagtgaatttccttcgcgacatgaaagatgattatcagattttaggacgttcttacttcccaaatgttgatatttcatactttgataatgcagtaaaagctcagattgaaaaagaaattgaagaagagttcaaaattgcactggaaggcatcagaaaattacctccatcctcaagattcggcgtttatctggcgtacagatattatatttcgcttttcagaaagattaaaaaaacgtccgctgccaaaattgtcaaccagagaataagaatatccaacggaagaaagctttctttaatgatgagcagttatgtacaatataaaacttcttttttgtagatatatttaccttacacccttgaataatgagacacagactatacagagaacagcagttgaattgtgatatagaaacggcatggaaatttttttcttcggcaaataatctttccaaaataacgccgaaagaaatgaactttgttgtccgtaccaaaatggaaaatgacgaaatctacgaaggaatgaacatcgattattacgtttctcctttgttcggaataaaaatgaagtggagaacgaaaattattcaggtagattatcagaaaagttttacggattttcaggaacagggaccttataagctgtggcatcatcatcacgagtttattcccaatgaaaatggtatttttatgaaagatacggtagattacgaactgcctttgggatttttgggagaaattgcgcacagcattctggtaaagaagaaagtggaagatattttcacgtacagatataagattttggaagagatgtttaataaaaatacagccaaataatgaattttctgattgtagctgccacattcttcattatggaaggaatgacgtggattatccataaatatgtgatgcacggttttttgtggtcacttcacaaagatcatcatgatcatagcaacgacggaccattggaaaaaaacgattatttcttcgttattttcgctgttcctacgattattctgatgtattacggaaccatgcagaattttaaccactggttttacatcggagtcggaattgcattgtacggaatggcttactttttcgttcatgatattttcattcatcagcgctttaaagttctcagaaatacccagaatccataccttttggcaatccggagagcgcacaagcagcatcataaacatacaggaaaagaaagaggggagtgtttcggatttctttgggttccggtaaagtacttcaaaatgtattttaaaaaacaaactacctgaaaatgcagcaatatacctatctgttagttaatttttttacaattattgtctgcttcattttttcctttcatcataagataaaattcaacagacattttaaagcatttattcttgcttcctctattgtagccctgttttttataatttgggacatctggtttaccaaaataggagtgtggtggtttaacgataaatatcttataggactcagaattgttaatctgccgatagaagaaatactctttttcttctgtatccctttctcctgcatgtttacctacttctgtctcaataaattttttaagctcgactggaaaccggagatggagaaaatattcgttattttttctatcgttactttaattattctcgcattgtactgtagagacagaatctatccgtttatgacgtgcttaacgacggcgatcagtatgtttgtactgtatttcatattaaacgcaagatggattggcaaagcctcttttatttatttgattttaatgcccggttttttaagtgtcaacggaattcttaccggtacaggattggattctcccatcgtaaattataatccggaacattttctgggaatcaggatcttaaccatcccgattgaagatacggtctacggttatgaaatgattctatggaatattttcctttttcagaaatttaaaaagaaagagcaggcaattgaagtaactgcataattctatcatcatataatcttctctaaaatctatttttcaggccacggttcttcggaatctgtggctttttttcttcaatcttttatcagagtaatttagaaaaatacttatgtaacaaaagtagcaataaaacagttttttaatcctgaaatttgtccttataaataatgtacgaatgaacttattatccatattattaggtaaaaaagataactccgcactggaaagtgcattgaaaaacaattcttttctggttgatgtgagaactccttccgaattcgcttcaggaagtgtaagaggcgcacagaatattcccctgagcgagattaaaaatcagatttcaaagtttaaaaacaaaagcgagatcattgtattctgtagaagcggaaacagaagtgccatggcaaaaggaacactggaaaaaaacggtatttcaaatgtgatgaatggcggaagtttagaaaatgtagtaaaaacaatgcagaaaatcaaaaatataggttgattttcaatgagaaggaaatctacggtaaaataaaaaatcaaaaaatgtttcacaatctatttaaaaactggaactttgtaagacttctgcgattggcaatgggaatattcctcaccattgaagcgttaaaatcaggaatgtggtttctgattattacaggagtgatttttacagtgatgccattgctgaatatcggatgctgttcaggaggaagctgttcggtttccaccaaaaatcctaagcagattaatgatgaaattgaatatgaagaaatcaaataaaaccattaataaacaaaatagaatatgaacaaatttcaggaaatcatcagtcaggacaaacccgttttggtagactttttcgcagaatggtgcggtccgtgcaaaatgcaggctcccattcttcaggatcttaaaaaagcaatcggagattcggcaaatatcatcaaaatagatatcgataaaaatcagtcagttgccgcacaattcggaatcagaagtgttcctactttaatgatcttcaaaaacggagaagtgaagtggaaacagtccggagtatttcaggcagacgaattggaaagattaataaaacaaaacatttaaaatgtacagaaacatcatcattgcattatttttagtagtcattacaggatgcggaaaagcacaaagtataacagataacgtacttcccgcaaccgaattttctcagaaactcgataaaaccaaagacgcacagttggtggacgtaagaacctccggagaatttacaaacggacatctgaaaaacgcaatgagtatcgactggaacggaggagatttcatagaaaaagccgccgctttagataaaaacaaacctgttttcgtttattgtatgagcgggccgagaagtaccgccgccgccgcaaaactaagagaattaggctataaaaacgtctacgaaatgcagggcggaatgatgaaatggagaaacgcagatcttcccgagatcaaaacttcaaccgcaaaaggaatcactcttacacaatacaatgatttgttgaaaagcaaaacgcccgttttggtagacttctatgcagaatggtgcgctccgtgcaaaaaaatggaacctttcctcaaaaaaatggctgccgaaatgccggataaaataaagatcgtaagaatcaatgttgatgaaaacacagaactctgtaaacaactcaacgtttctgcgcttccggtgctcaaactctacaaaaacgataaaattgtttgggataatctgggattggtaaccgaagatgaggtaagaaaacagattacacaataaatcatggataaacctcttctgtggatcagaaaaaactggagtacagtgattatgattgctgtactcatccttttatgggtaaatcccgacgcaaaagcatgggtgatgagacagatgatttccacaggattattcaattcaaaaatagaagaaaaaacaaaagaatcatcttcacttgtaccgccgaatttcagtgtaaaaaatgaacacggagaaataattgaaacggctcagctcagaggaaaagtagttttcatcaatttctgggcatcttggtgttctccatgccgcgcagaatttccttcggttcagaaactatattaccggtacagatcaaacgaaaatatggtatttcttaccgtaaatcttgatgatgaaataattttgggtaaaaaatatctgcagaaagaaaaattcagtattccttttttagttccgaacgacagcattccaaaagaattgtacaacggttccattccgacaaccactgttctggataaaacagggaaaataaggatgcatcattcaggaatggcagattacagcaaagcctcattctatcaggaaattgaagcgcttttgaaagaatgatttaaataaaaataaacttagcgatccttcgttaacaatcaatgtgattaatttttgtgcctaaacaaaaaaattcaggcagacgataatttaaaaccattcttaacgaaacattttataattttgcataagtgaaaaaactgatctcgatactattgcttagtttatacttggtttctacaaccgagctctatcagtttttgaaaattccggttcttattgagcattatctggaacacaaacaggagaatccgaaactcaccattggttcattcttcaaaatacattacgataatccggtaaaagattcagattataccaaagatcagcagttgccgtttgtttcccacgcagcgcatcttatcatcgtatgtacacctgcgacaccctttacgtttcagttgtccgacaaagaatccaacccgattattaagtccaaacagactttttataaaagcatcttttacaataaagatattctcaattccatttggcagccgccgaaatcttgttgatttttttctgaattcctctcaaatattactttgggagatttctgatacttattggtaaattttatacacgtttttatttgggcagcttaatccgccagaagtttatcctgagcttgtcgaaggattcccgcttttttgttccaacgaagagctcgactcaaatcgaggaacgagattcgctgattcaaaagttaaaggtaaaagaatgaggcacttcgggctgcaagccagtataaattccagtgattaaaacaggcattaattggtatcagaccattattatttattcataagcatttgctagaatagtaaattaaaatagagatatttatctgtaaaccatttatctatcatctattatcaattatcaattatctatcatctgctaataagctcaacaaaacattatgcttacaaaaatcattgagttttctgtaaagaacaaactcatcattgcgctgttgattttgggattgataggcgtgggttcctatcaggtcaccaaacttccgatcgacgccgtccccgacatcaccaataatcaggttcaggtcattactattgctccctcatttggagcaacagacatcgaaagactcgtgacatttcccatagaacaggcgaacaataacatttcaggattaaaagagatccgcagtttttcacgattcggtttatcgctcgttaccatcgttttcgaggatgacgtcgatgtatactgggcaagacagcaggttgcagaacgactgcagcaggttcagacccagattccgcagggaatcggaactcccgaattaggtcctatttccacaggtttaggcgaaattttccagtacgtgatccgtcccgaaaaaggctacgagaaaaaatacgacattacagaacttcgcaccattcaggactggatcgtgagaagacagcttctcggtgtaaaaggcgttgccgaagtcagcagtttcggaggaaaactgaaacaatacgaaattgccgtcaatcccgacagattaaatgcttacggaatcaccatcaacgatgttttcgatgctttaaacaccaataaccagaacacaggaggagcttatatcgaaaaaggtcccaccgttttatacatccgaagcgaaggtctgatcggaaatattgaagacatcaaaaatattgcgatcgcttccaaaaccaatgaaattccattgtttataagagatgtggcagacgtgaaaaccagctttgccacaagatacggtgcaatgacgttcaacgatcagggagaagtttccggagcagtggtgatgatgctgaaaggcgaaaacagcaatcaggtcattaaaaatgtaaaagaaaaaatcgcacagatccagaaaacccttccgaaaggagtagtaatagaaccgttcctcgatcgtaccaaaatggtaaacaacgccatcggaaccgtagagaaaaaccttacagaaggcgcattgattgttgtttttgtactggttttattcctcggaaatgtacgcgcaggattgcttgtggcttccgtaattcctcttgcaatgctttttgccatttgtatgatgaatcttttcggagtcagcggaaacctgatgagtctcggtgcactggattttggtctgattatcgacggtgcggtcattattgtagaatccgtcctgcatcagttcagccataattcaaaattcaaaaaaatattctccgtcggaaaagaagaaatggataccattgtgatcgattctgccggaaaaatgatgaacagtgccgtttttggacagattatcatcctgattgtttatcttcccattcttaccttacagggaattgaaggaaaaatgttcaagccgatggctcaaacggtggcttttgctttattaggcgcatttttactgtcgttaacctacattccgatgatgagctctttgctgttgagaaaaagaaactcaaagccaactttatcagaccggatgatgaaaaaagtagagaaactctatcttaaaacactgcttaaaatcttaagagttccgaaaatggtattctccatcgtggccgtacttttcgtagtggcaattttcattctcagcagaatgggaggagaatttattccttcccttgaagaaggagattttgccgtagaaaccagagttttgccgggaagtaatctgaatacaaccattgaaagtacccaaaaagccgctcatattctgaaatcgagatttcccgaagtacaaaaagtcgtgacaaagataggaagcggggaagttcctacagatccgatgccgatggatgccgcagatttaatggtgattctgaaagataaaaaagaatggacttccgcatccacattcccagaactggcggataaaatgaccaaagaactacaggatgttcccggagtaacggtaagttttcagtttccggtgcagatgcgtttcaatgaactgatgacgggagcaagacaggatgtcgtggtgaaaattttcggtgatgatctggacgttctttcccagaatgcccaaaaacttgggaaaattattgaaactgtagacggagcccagaatctttacatcgagccgattgcaggaatgccgcaggtaaccatagaatacaaccgtcctgttattgcacaatatcatttatccatttccgacatcaaccggattgtgaatgctgcattcgcagggcagagtacaggtctcgttttcgaaggcgaaaaacgtttcgatatggtcgttcgtctcgattccaaagttcgtaaaaatgtggatgatattaaaaatctgcttgttccgacacctttcggaaaccagattccgctttctcagcttgcaaaagttgaagtaaaaaacggacccaaccaaatccagagagaaaatgcacaacgcagaattgtcgttggattcaacatcaaaggaagagacgttcagagcatcgtggaggaacttcagactaaagtaaacaaagagataaaacttccgacaggttattatatgacttacggaggttcttttgaaaacctgaacaatgcaaaacagcgtctgatgattgccgttccggttgctttggcgcttatttttgtgatgttgtttttagcattcggctcggtgaaagaaagtctgctgatttacaccgcaattccactctcaattattggcggtgtatttcttctggctttgagaggaatgcctttcagcatcagtgcaggtgttggattcatcgcccttttcggagtggcagttctcaacggaatcgttctcatctcagaattcaacagattatacaaaagcggaatccgtaatatcgtaagaattgtaattgatggcggagaatccagacttcgtccggttctgatgacggctttcgtggcatctttaggatttattccgatggcattaagcaacggagccggagcggaagttcagcgtccgttggcaaccgtggtgattggaggtctgctcgtggcaaccttccttacgctttttgtactgccgcttctttatgtaaccattgaaaaaggatttaaaatgaaatcgccatcatttggaaaacgcaaacgcttatgaagaaaacgcgattacatatgacctttaaaaaacaataaatatctacatatgaaaaataatcacaaaaatataacggctgtattgattttgctgttcagctttgcagaatttggactgaaagcgcaaacgccaatcaatcttcagactgccattaataccgcactggaaaacaacagaaatcttaaaaacgaaaaactgaaatcggaatattccaaagctttgataaaatcggctaatgatattccgcagactggtgtaacgttcgattacggaaagatcaacagtgcgtacaacgatatgaaatttggcgtttcccagaatattgcttttccgacagtgtataaaaaacagaaaaatgtatacaccgaagaatggaaaaaatccctgctgaatgtttccctgaaagaatatgaacttaaaaaagcagtcagtcttaccttttacaacattctgtattggaaagaaaaagaaagactgctgaatgaaatcctgaaactgtacaccgacttttcagacaaagcgaacctcagactgaaagcaggggagagcaatactctcgaaaaaacaaccgcttcaagccagaaatcggcgatagaaattcagttaaaacaattgcagcaggaattagccgtattaaagatcctgtttcagtggcttttgaatacggaaaccgattttattcccgaagattcaaaatcgtttgccaattctttaaacgaaaaactggcggatcatcctttgcttaaaatctgggaacaacagaaaaatatttccacagaacagattgcactggaaaaagcgaaaatgcttcccggtctgcaattggcgtataacctgaacagttttaaaggattgggtccggatgataaattgtataatgcaacacctcagtttcattcggttcaggtcggtgtttcgcttccgatattttcaggaggccagaaagcgagaattgaagccgcaaaagttgcgcagtctgttgcagaaagtgaactgaaaaacgctgaattcaatcttcagaatcagcttaaaaaagccagagaaatctatcagtccaatctcgaaattgtttcaaaatatgaaagctccgacctgaaaaatgcagatgtgatcaccgaaacggcgaaaagacagtttatcggcggagaaatcaattacctagaatttgtgatccttgtaaatcaggcggtacagcttaaaaacaattacaccgatgcagtatggaaacttaaccaaagcgccattgaactggaataccttactttaaatccgtaaaaaaatgaaatcaatttcaatatataccttattaatcagcttttttgtattcattcaatgtaaaaaagaagaagctccgaagcaggaaaaaagcctcccgaaagacgaaaatgtagtgactttaaccgatgcacagttaagaaatgcaccgatagaaacaacgatgctttcattacaaaatatcgcttcaaccctgaaattaaacggaataatcgatgttccgccgcaaaatctggtttctgtaagcattccgcttggcggctatctgaaatccagcaatcttcttccaggaatgccggtttccagaggtcaggtgattgccgtgatcgaaaatccgcagttcattcagcttcagcaggattatctgatggcaagatccaaagcacattttgcagaactggattacaaccgtcagaaaaccctgaaccaaagtcaggcaagtagcgacaaagcaatgcagctcgctcagtctgaaatgaacagccagagaattttaatgaattcattggcgcagcagctcagactaatcaatatcaatcctgaatcattaaaatcaggaagcattacgaaaagcgttcccgtgtacagctcaatcaatggttttgtaagcaaagtgaatgtgaatatcgggaaatatgtaaatccttcggatgtgctttttgagctcatcaatcccgacgatattcacctgaatcttaaagtgtacgaaaaagatctggaaaacctgaaaaaaggacaacgttttgcagcgtacaccaatgcagatccgggcaaaaaatattacggggaaatccttctcatcagcaaagatatcagtcagggcggtttggcggaagttcactgtcatttcgataaatacgatcacagtctcgttccgggaatgtatatgaacgccgaaattgaaaccagcacctctttttccaatgcggttccggaagaaagcatcgtgaattttgaaggcaaagactttgtgtttgttgaggttaaaaagcagacgtaccgattgactccggtgactttaggcgaaacggaaaacggttttatccagattctcaattctgatgattttaagaataaaaagatcgtgaccaaaaatgcctatacgcttttgatgaagcttaaaaatacggaggaagaagaataaaatattaagtttaaagtaatttgatataatcaatcgtcagttaaatatatagagtctgtttaaactttttatttaaccgcaaaagtaaaaaagatgaagtaaaattttgaagtagcttagagtaaaatagctttgctcctttagaagcaaaatctgtgtagaaataagaatgaatgtatctgtaatacgataaatgttctaaagatagcgttcctacggaacgcagtatatcttgtgaatatgatttctacacagataaaactccatcgagttttctaacattttactttaaacaacttttttatttaaatattctaatcatcgcattatgataatcttttgagcctattgcggataattcggaaattagtttaaacaataaactaaagatgaacaatttattgaacattgtagcgttataattcagattaatttaaaatcattcttaacagaagattttatacctttgattaggtgaaaaagttgatttccatattgttactatccctgttcttggtttctacaaccgagctgtatcagcttttgaagattcctactctggtggaacattactgggaacataaacagcttaatccggaaatgccactgattgcgtttttcagagcacattacgatcatcctgcaaaagacggagattacggcaaagacagaaaactgccgtttgtaattcattctgcaccgctgaatttggtttttaccatcaatccgggtttttattttgaaacaaaaactgaaaatttcagatccctgaaatcacataaaatnnnnnnnnnnnnnnnnnnnnnnnnnnnnnnnnnnnnnnnnnnnnnnnnnnnnnnnnnnnnnnnnnnnnnnnnnnnnnnnnnnnnnnnnnnnnnnnnnnnnaaatcattataacattttacagtaatgaaaacaatagtatcagccatacttatggttgtattttcctttggtttccacgcacaaaacagactggaaatcgcaaaaaaaaccgctgcagaaaacaaagaacttattctgcttaatttttccggttcagactggtgtattccctgcatcaagcttcataaaaacatcattgaaacagaagatttcaaaaaactggaatccgataaagtgatcgtttacatcaatgccgatttcccgagaaataagaaaaatcagctttctgcggatctcaaaaaagaaaacgcttctcttgccgatgcatacaataaaaaaggcttgtttccgtatacccttttattaaattcagaagggaaaattctgaaaagctgggaaggacttccttctgaaaatgcactggctttcagtaaagaaatcagagaaatcagagaaaaacaaaaataacagaaaaagagatgcttagagaattcaaaagacctcagaaactgatggggaacgcttttgaaattaccgttgtaagtaatgatgaaaaacttgcacaagatcacattgatgcagccattgccgaaatccgcagaatcgaaaaacttttgactactttcagcgatgacagtcagactaatctcattaatcaaaatgcgggattaaaacccgtgaaagtagaccgtgagatttttgacctcattgaaagaagcttacgaatcagcagaattacagacggttacttcgatatttcttacggcggaatcgataaaagtttctggaatttcgaccgtgaaatgaaagaacttcccaatcctgaaaaaataaaaaatcatctgaaactcgttaattatcagaatattattctcgatcgcgacaatcagacggtttttctcaaagaaaaaggaatgcgcatcggttttggaggaatcgggaaaggatatgccgcagaaatggcaaaaagaattcttcaggaaagaaatgtacattccggaattgtaaatgcttcgggcgatttaacgacttggggaaatcaggcagacggaaaaccctggactgtaggaattgccgatcccgacaatgcaaaacagcctttttcttatatgaatattacggatatggcggtcgcaacttcaggaaattacgagaaattcgtggtcatcaatggtaaaaaatattctcataccatcaatccgaaaacaggaatgccggtttcgggcgtaaaaagtgttaccattttttgtcccaatgcagaaattgccgacgcaatggcaactcccgtcagtattatgggaatcgatgccgcgctcagtatgatcaaccagatcaatcatctggagtgcatcatcatcgacgatgaggacagaatttattcatctcaaaacattaatttaaaataaaatgctttgttgtcagaacaaaattgagttaaataaacacacagtatctgattcagagtaaggcaattaaatcaactttaaaaacaaatcaatacaaatgacagaccttataaaaaacagtcagaagcttttcggatatttatttgggcagctttcaccgtcttccactcccgcttttttgttcgttcctcacaaaaagagctccgttcaagccgggctgcgaagattcaacgctttaaattacagaacagttgcagttctttcgatattgacaattccgtttttgaattcctgtaccaccgtaaaagaatacgaaaaaaataaactcaacgatgccgaaatggttctcggaaaccgaacaattgaaaagaccgaactgagctttcagtcttacagagaaggttcttcaggagccaatgccggaaaagtgggcggtggttgcggatgcaattaagaaaagagaatggtaaaaatttaatgtgatctacaatgaaaaaaataatcataagtgttgttgctcttttcggaatttttaatgcaaaagcacaggaaaacacaaatagcgaacagcccaaaaagctgacttttgatgaagctaatttagtttctagttactacaaacaggacggaaacaattctgccgttacaggaggaatcggttcagaaaaactgaccgatgtttccaacacgatcgatgtaacgatggtaaaatacgataaaaaagaccgtaaaaataaattcaatttaagtgtcgggatcgatcattatacttccgcatcttctgatatgattgatcttaaagccaattcatcggcttcgcatgcagacaacagaatttatcctgcattaagctggagccgcgagaatacggataaaggaacgactttaatggcgggagtttctacctctttcgaattcgattatgcatcttacggggcaaacatcgggttttctcaaaaaacagcgaacagaatgggagagttcacggcgaaatttcaggcatatctcgatcaggtaaaactcattgctccgattgaattgagaaccaacggaagcacaggcggcgaacacgaaaactacggaaccagcggaagaaatacctttgctttatctttggcgtactcacagatcatcaatcagaattttcaggttgaatttctggcagacggagttcagcagaccggatatttaagtttacctttccacagggtttactttaatgataaatcggttcatcaggaagctttgccggataaaagatttaaaattcctttgggagtaagagccaattatttcttgggagacaaagtgattctgagagcgtattaccgttattacaccgacgattggggcttgaaatccaatactttcagtctggaaacgcctgtaaagatttctccgtttgtttcggtaagtcctttttatcgttactattcgcagactgcggctaaatattttgcgccttatcagcagcataccgcttttgacgatttctacaccagtaattacgatctgtcaaaattcgacagccatttttacggagcaggaatcagaatcagtccgaagaacggtttattcggcgtagaaagactgaatatgctggaaatacgatacggacattacacaaaatccatcggaatgaagtctgatattatttcgttaaatttaaggtttaaataaaaaatcagtttaattttggcttgttaacacatttagcaagtcattttttttaacttaaaaactaaagcatatgcatcatcagttggaaaaacattatgtaaacagagtaggctggcttcgtgcagcggttttgggagcgaatgacggattattatcaaccacaagtatcgttattggtgttgcagcagccacacccgaaagaaataccatcattcttgccgcactcgccggaatgattgcaggagccatgtctatggctgcaggcgaatatgtatcggtaagttcgcaggaagataccgaaaaagcagatcttctgcgcgaaaaacgcgaactggaagaaatgcccgaagttgaacttctggaactggctaaaatttatgaaaaaagaggcgtaagcaaagaaacagctttgaaagtagctacagaacttacggaacacgatgctttggcggctcacgctcatgacgaactgggaattaatgaaattactcaggcaaaaccgttacaggctgctttggcgtcatttggttcttttgctttgggagcgttactgccgtttatcgtttcactggtggctcccttaaaggaaatggtgtattttcaatatggcttttctattatatttctgatgattctgggcgctatttcagcaagaacaggaggctcaaaaataggaatcgccgttcttaggatttgtttctggggaacggttgcgatgggaattaccgctttaatcgggcatctttttggagttacggtagcttaaaagaaaaaaaactaaagatgagggttggatttttccagccctttttttgatttaaaaaatcagaaaattaaaaatatagcctcatcacttttatcaagtaatttgattttagcgtattcagatttaaaaattaaatcatagtttttgtacattcaatcaagataattctgctctgaaatgaagaaaattaagatgaaacatgataattttcatgttcttttattgtaaagtgtaaaacttttcacagaataataattatttttgcgcgttaattttattaattctaaataaatttagtttacactttggctcccaaatgaaaagaaaaattgcaagcgctatactgatatgtggactgacgtctttaaaagctcaggatcttaaggctgataacgattcggtaaaaacccagatgattacagaagtaattgtaacatcctcttacggaacaaagaagttaaaggaagaggtagtgggatctatcgtgagtttaaccgaaaaagatattgtaacaactcagccttttgaaagcattgataaaatgattatgggacttacgcccggggttcagattgttaataatacggaattggggaaagccgtaaacatcaatatccgtggtttgggaagtatcatttcattgaacggattaaccggtacatcaacccagccgctgattattgttgacggaattatcatcagagaagatatggcgtttgatgcttcgtattttaacggaggatctattgctgaaatgaatatcaatcctttggcaagatttaattcagataatattgaaagcatcaatatcctgaaagatgcagctgcagtagctttgtatggagcagaatctgctaatggggtgattctcattacgaccaagaagggaaagaagggaaagccttcctatacattcagtacgcaatacggagtttcccaaagcatcaataaaattaaatatctcaacgggcagcagtacgctcaggtgttcagcgattacaataaaaataacagtgccaacggaacaggcagctacgtctggaacggaacagatgtagactggttcgaggtaatgaatggaaacggagattttttccgaaccaattttacagccagcggaggaggaaaatattttaattatcgggtagggctggattattcaaaaaacaatgagtctaaaattctcaattcgctggaaaaaaaaggaattgacgcttctttgggatttaactacaaaaagctgaagataaatctttacgctgcctataacaatttttttaaacagcagcccaatacatattttaattttatactggctccggacagagctatatatcagacaaacggagattatgcactttccggaaataatggagttcccaatcctcttgctgcagccaatcagaatatcctgaatgttgataataattctctgctttccagtcttaatgtcagttacgatctggcaaaagggctaaaaataagcagtttattcggagtggatatatcaaaaaaaaataatgtcgactggaaatcaggacttaaccaaagcggaatttcaaataataattatgggagaagccgtttgtatatttcagatgcttttaactggaactggagtgcccacatttcttatgagaaaaacttcgcaggaaaaaatcatattgacggtattgcaggttttgaacttagaaaaaataaagactctaaaacagctcatataggaagcaatttttccgattactccacttatcaggaacctatgatcggaaagacatacacctatagttcgctaacgcgccaaaatacggggagaagtactttcggacagcttaactatgattatgataaaaaatactttctttctgccagtatcagaagggatgaaagctccacttttggtccggataccaatgcctctaccaatggtgcaataggaacctcatgggttttatcgaatgaaaattttcttaagtccaataatatcatcagcttcctgaggctgcgtgcatcttggggaatcacaggaaattcgagaataggaagttaccgctcttcagggctttatacagtttctcaaaacggatttatttacgattacgattatgcatatcctgaatcttcatcgcctcccaacaggcttctttcatgggaaaaaaatgaaaaatggaatatgggtctggacttcagttttttcaaaaaggtagattttaccgttgaggttttccggaataatctttccgatatcattgtttctagagaagttccgctggagacaggatattcttcagcagaaattaacggtgcggcaatgtataacaaagggtttgaaatttctatgcgcggaaactggatctccaacaaaaatttcagatggaatacttcattcaatatttcaaaggttgaaaataaagttacggatatgctgggtttggaagatagcttttccagtgcatcactagccagagcccaaaaaatcggagcgtcaacatcggcaatctggggatatcagtggctcggaataaatccggcaaacggacaggatatgtttttggtaaacggagaagtgaaagatgccaatcagttcacgccggattcttctacttatacaatcatcggaaattctcaaccggattttatcggcggtttcagtaattctttaagctataaaagattcacgctgtcttttctcgttaattttgaaataggaggagatgttttggtacagggggaactgatagataaatacagtattcttttcaacaggaacatgagtgtaaatgcacttgattattggaaaaatctaggagataatgccctgaatcataaacctacaagcaaggcaactattgccaacagcagcaaatatatttatgataatacctttgtgaaacttcagaacatcagccttaattatcagcttcctgttaatgtcattaaaaaaagttttataaaatctgcaagtatatttatggattgtaccaatgtgctgtactggtacagacaaaaatcgccggaaggaagaaatggcatcagagagttcagatatttatatccggaaatgagaacattcagctttggattcaaagttaatttttaattatcagcattatgaaaaaaacaatttttaccattatatttttaatcagtttatcgtcatgcagagattttctctataatgaaccggttgagagtgtctctatcaatgagcagcttggaacaaaaaacggaatgctcgaatctttaaacggagcctattatcagctaagatccacctattttctggaaccggctattacttacggagatctgttgtccggtaatttcaaattttctccggctacatccgggaatatttcaatagattcccaagtttccaatatatatcagtttgatgatcagaagacagaaagtgatctagcctatttctacagcaatatgtatcagcttattaataatgtgaatcttattctgcagtatgcagacaatttaacagatgcaaccccttctgaaataagcgaaataaaagcggaagcattgggactgagagcttttgcgcattttcagttgtataaatattacgctcagaattacagctacacagcagatgcatctcacctcggaattgtttacaacttaaaaccgctgaaagtgggagtagactatccgtccagaaaaaccgcagcagaaacatttgttctgttggaaaatgacgttcagcaggctctatcactttttcagtccgaaaaagcaattccggcaggattaaagaaaaactttctcaccgcaaatgcggttaaactgttagcttcagaaattgccctttggaaaggagactggcaaaaagccattaattatagtaatgatttgattataaattcttcatacactcttactccaggtaatgaaatggcggataattgggctgtctcggaatctatctttgaacttgccaatgacagtaataacgattttcctgcttcacagctctataactttataagctccggaagcaaatccagctatgtagcttctcatgatgtttacaacctattttcttcttcagataaaagaaaaactctttttgaaaccaaaaatcttgcaacaaagatttcgggagtatcggtatctcttccttaccactttacaagaaaatataaaataaaaaccggtagtttaatctatcgtctcacgctggcttattttattcgggcagaagcagcatttcatgcaggaaacaatacacaggcacttaatgatatcaataccataagaaacagggcaggactcacaagtcttaccaatatctctctcgatgccattctcgaagaaaaaagaaaagaatttatttttgagaatcagtatttctttgatctgatgagaaatcataaaaatattgtgagaaatgatggctgtatatccttaaactgtaatcctacctatcccaataataaatttgtagctcctattcctcaggcaacaataagtgttaattctgccatgcagcagaatccgggatattaaataaccgttttttagagcctttctcatattctgttagacgttgaaacggttgtccgaaattttttatatcaggaaaaaacagatgaactttacagcgactgtaagaatcatgatgaaaacttgtttaaactaatttcagaattaaccgcaaaagggacaaaagaaaatgttaaagcgagtttccagaataatcaaagcgttcaaaagaataaaaatcaaagatttttaaaaactattgtgagctttttcatttataatgatcagctttaaataaaaaaatagtagatcttttgtgacttttgaggttaaataaaagtttaagctaagcagacttttaataaaaataaacagaagaaatattttaattcatcaattttcaatgttactttaaacgttatttattcaggaaagaactgcttttaaaattaaaattaaaaatctaaaaagatttatattattaaaaattacctacgcaaaattaaactgaaggtggaaacatcaccgtttataatcattaattttgcttaaaattatcaggaaaaatgaagaatgcattgagttggacattaattgtatgtgtaagtattttcttacttaataattgtaaaaccacggtacataaagatatttctcagaatcagtcatttatcagcaaaatcagaaagctgtattcctccggagatccttcttcgtggccgaagcccgaacttaatgaactggctgttcctcatttttcagaaatcgggcaccttcccaaagttaagtttcctgaaaataatccctattctaaagaaaaagtcctcctcggaaaaacacttttttatgaccccagactttccggttccaaccagattgcctgtgcttcctgtcatgatccggaacttggatggacggataacaaaacacagtcttttggccatgaccgacagttgggaaccagaaacgctatgaccattatgaacatcgcatttgcgaaatcattattctgggacggaagagctgaaagcatagaacagcagtctcagatgcccatacaggatcagaaagaaatgaatgagcatattgatattgcaacagataagatcgcaaaaattaaaggatatgaatcgctttttgaaagagcattcggtaccaaaaccgttacaaaagaaaagattgcaatggcaatagctacttttgagagaacattaataagccctcagacaaaatttgataaatttattgatggtcagtcagacgcctttacagatgacgaggttgccggaatgcatcttttcagaacaaaaggacaatgcatgaactgtcataattcaggatatttttccaataatcagtttgagaatgacggaaccggtcttctgggatccagacaggaagatctgggaagatataaagtaaccggtgatccttcggatgcggggaaattcagagtgcctactttgcgggagatcaccagaacaggtccctggatgcataacggagcttttggtactttaagagatgtattgacattttacaatggaggaaatccggagccgcctaaaaaaagagcaactgtacacaatggagtacagttggtttcgaaaaaatcggtgatgctgaaacctttacatttaaccgagaaagaaataagtcagatagaagcatttttagctaccctgagtacaagaacccaaaggttggttcctcccggcttacccaaataatttaaactgaatttataaatgtgagcttttataattattacaaactattgaatatctttattttttgataatcactttttaatggttgtgaaatatcatcaggacaagtttggagcttatctccaaaaaaatgatatttcaaaataaataatgagctactcataaagtagcttttattgtaattttaaaattcaattattcctcatccctctccgccaaagactccttcagtttcagcaattcagcctttacaaattccagcctgtcgatgatggtgatggtttcggagatcttgctgttggtagttaaagcgattttagcaccgtccagagtgtagcctttttcttttacgagatgataaatgatctgaagatttttgatgtcttccggagtgaaataccggttgccttttttgttctttttaggcttaatgatagggaattcctgttcccaataacgtattaatgaagtatttacatcaaaagctttcgctacttctcctattgaataatacagtttatcaggtaaatttatcttcatttttagaatcgtaatggtcaaagataaaaattttttaaatcccacagcaaattaagagggcaaaagttctttttttactttgtaaatcaggggataaaagtcatttttatagtacaggaagttttattgtttttgttatttttgaaggataaaaatttctaaaaaattgaactctatctctgtcctgcatatcaatctttttcaaccgggtaaaaacacttcggatttttattttaaccgaatgaaagaacatctggttttgggacataggtatattgaaaaaccgcaccgtcatgatttttatgccacgattctctttaccaaaggaagcggaacacatgaaatcgattttcagaaatatgatgtttcggcgggaagcttattttttatgtctccgggacaaattcatagttgggaactttctgaggatatcgacggatatatttttttctgctcacaggatttttacgaaatgcattacgttaatcagaagctcagaagttttccttttttcggatcggtaaatttccccagaaaattacagcttactgcaacggaattaagggaaaataatcacctttttgtggcactggaaaaagaatatcagcttcaaaacgtgatgaaagatggttttattctttcactgatgtcacagatttttatccacgcaacaagagctttttcaaaagagctgggaaaagaaaattctgaggttaatatttcttattttaaacactatcaacagtttgaaaatcttattgaagagcattttgcaaaagaaaaatccgttgccttctatgcttctctgctggaaatttcatccaaacatttaaacagaattaccagaactgtcgttcagaaaacagcgactgacgttattacagaaaggataattctggaagccaaaagaatgcttatgtatctcgatgaaagccttacggaaattgcctttcgtcttggtttcgaagaatattcctattttgtgagagtcttccgtaaaacttccggcatgactcccacgcaatttattaaaaaatataaagcttaatttttgttgatggtatgaaattaactccaacaaacttctctctaaaacactcaaacactcaaacactcaaacactcaaacactcaaactcaatacctacaataccaattgaaaaggtccttcaaataccgtttcgaaagaatctaccagatttcctttttcatcaaacacgccaatcgtcatattttgcttagaaaaccggatctctttttcggggaacgaaatgttgatatttccttttaagatttgatcccctttcaatatgattttttcattgccaaagaaattgatttccgcattcttaggattcaagacttttatcgtgagtgttttcttttcgttggatttgtttaaaagcgtataaataaaagtattcgtaatttttccgtttttaatgaaaaatgttgatcctgccggtttaatgaatttagcttccatcgaacctctgtcgtacatcagaaatcctaaaaacccgatcagtaaagttaaaattaccgttgttgctttcattcttccggtaaatttgaatttctcctgattttcaatttccgcttctgtggcataacggatcagccctttcggaagacctacttttaccataatttcgtcacacgcatcaatacatgcggtgcagtttacgcattccagttgctgtccgtttcggatgtcaattcctgtaggacagacaacgacacattgattacagtctatacaatctccttttccgacggcttttcggtcttcgtcttttttccatttggagcggttttcacctcttttaaaatcataataaacgttgatggtctgtttgtcgattaaaacgccctgcaatcttccgtagggacaaaccagagtacaaacctgctctctcagccaagaaaaaacaaaatagaaaaccgcagtgaaagagatcatcgcaagaaacttcaaaggattttctgcgggaccttcgataatgattctgaaaacttcttcataaccgacaatatacatgaacatgaaattcgtaatcaccacagaaagaacggcgtaaacagaccatttggttagcctttttcttattttttcgctgttccattcctgtcggtcgagcttcatctgtttattacggtcgccctcgatccagtattctattttccggaaaaccccttccataaaaatggtctgcggacaaagccagccacagaaaatccttccgaaaacaacggtgaaaagcatcacaaaaataacagaagtaacggctccaagtgctaaaatgaaaaaatcctgtagataaaacggctgtccgaaaataaaaaatttcctgtcgataacattcaataaaagaaaaggattgtggttgattttcacaaaaggtaaagtgaaaaatatcgctaaaagcaaataagttacataatctctgtagttggtaaattttcctttgggttttctcggatagacccattttctttttccggtttcgtccattgttcctacggaattccggaagctttcctcataaagttccggagcctgaaaattgctgttctgtgtattcatctttttgatttgatctgaaagctggctgaaatcatttaataaagtttaaatgctcatttccagatatttttaactaaaatcctatagtgtttttcactgatacaaagctctgcaataattgtttcctgaactaatatgatctgcttctgaaatagtacaattcggacattttggatttggtttttatttaatcaaaaagagaaaataaactttgaatctcattttacatatcgtaaattgcctgctttaaaaattgtgcggaatgaaaaatattttaaaaaccggctcgcttggtttgattttagcagtatatagctgtcaatcagtaaataccactaaaatgttttatgaagatgtaaagcccgagaaagtttcggatcaattcagttttaccgaaggtccttcctcggataaagaagggaatgtgtacttcacggatcagccgaatgataagatttattattgggactggaaaaccaataaagtgattgagttcatgaataaaacgggaagagccaacggaacacatttcgataaagatgataatttaatcacctgttccgatgatcagggtgaaatctggaaaatttcaaaagataaaaaagtacaggttctgctgaaaggctttgaaggaaaaagactgaacggaccgaatgatgtctggaatgacgagtttggcggaatgtattttaccgatcctctgtatgtacgagattactgggtgaattttaagcaggaaactccgcataaaagtttatactacagaaataaagacggacagatttccaaacttgaaacctttacacagccgaatggagtggtaggaagcgaaaaattcagaaaattgtatgtttcggatattgatgccggaaaaacatatgtttatgatattttgggcgaaggaaaattatccgagaaaaaacttttctgcgaaatgggttccgacggaatgacgttagacaagcacggaaatctttatttgacaggaaaaggagttcatgtattcaacagagatgggaagaagatttatcatattcccatcgaagaagactggacttctaacgtgactttcggagggaaaaataacgaagttctgttcatcaccgcttcaaaatctgtttatactttaccgacacgggtaagaggagtgagataaatttaaggttgaggtttagataagcgttgtgttttaatctcagccttaatctaaaccttaacctcaatcttaatacgccacttccattttcactttcttgcccttcagtttttcattggcaagttttttcagcagtgcgttgactttatttctcgatacggcaacataagaagttgtgtcttttacttcgatcaagccgacatcttctttctggagttctccttttttcaggagatagccaacaatgtccactttattcactttgtctttttttcccgcgctgatgtaaatggtctggaaaggcgttttttccggcactttggtaaatccggcaacgctgtcttccggtgtattgtttttgatgaaagggaaattttcatcttccgtcataataagatacgcaaaacctttcgcgttcattcttgctgtacgaccgtttctgtggataaaagcatcctctttcggcggtaactgataatgaacgatcgattctacttctggaacatctaaccctcttgctgcaagatcggtagtaattaaaattcttgcggaatcgttcctgaatttcagcagggcgcgttctctttcatcctgttccattcctccgtggaaggtttctctgtcgattcctttctggcggagaagctcggaaatccggtcaactgcttctctgtgattgcagaaaattaaagttcttttgttcccgattttacagattaaattaaataaagtgtccagtttttcttcaggtgtagtcattacctttttaaactgaatgtcgggttttgcttcgcttaattttagaaagttaatgattttctcgtcttttagtccggtaaatgcaggaatttcgtccattgccgttgcggaagttaaaattctctgagacaatcctttcaatgaattggaaataaactccatatcatcatgaaaaccaagctcaagagccttatcaaactcatccagaaccagcgtttggatggttttcggatcaaaattattatttctcaaatgataaaccactcttcccggtgttccgattaatacagccggagcttcaatcaggttatttacctcaatttttttatcgtgaccgccataacacacggaaactttaaaatcggttcccatagctttaaaaacctgctcgatctgtaaagccagctctcgcgccggaaccagaataagagcctgaattccagaactgtttttctttaaatttctcagcacaggaaacaaaaaagccagtgtttttcccgaaccggtaggagagagcagaacaacatcctgattgttttctgatgctttgtatgtagatttctgcatctgattcatgtcctgaatctgcagtttttcgtagatagattctaattccatggtgcaaagatagttatttcgcgaatgaagaatattgctgtttgatgatggtttgagattttaggatatttttcttaataataaaaggtatggagaaaattcagaagattaaaatgatatttcaaacttattggaattacggaaatccgtaatgtggaagcttaaggagatgataaatttggctcaataaattaatcaccatgaaactctatcaaactcttgaaaatcaaattaaaaaggagcctaattacgtttccgacaacggagaagttaaaaaatgggtcgttctcagcaaagcgcagaatctggatgaagaattaattgaactgcttctgcaagatcccgatctgaaggaaaattttttcattaaggtaaaagatgttctggtctttaagcaaagtctgtttatccagtttctggagcagaaaaattatcttaacgacagctacacccagtttaaaaacaaagtgggactcaccattggaaatcaatacttaaagcagcggaatgaagtgtccttagtttggccttttaaggattgtgttctggaaggaggacaaagccgggaagaggataagagggaagaaatctttttcaatgaaacattggcgcaggacgaaattaccgaattgtttgatcccaaagtcttaaccaacgccaaaagaattgaccaaaacggtgaaaataattttgataaattcaatcgtaatgaaaacggaacgattaccgataatctgattatcaaaggaaataatcttttagcgcttcattccctgaaaaaagaatttgccggtaaagtaaagctgatttatatcgatccgcctttcaatacaggaaatgatacttttaaatataatgatagattcaatcattcatcttggttaactttcatgagaaatagattaaatattgctaaagaaatattaagtaatgatggaaatattctaatacatatcgatataaatgaaatacattatttaaaaatactttgtgacgaaatatttggtagagaaaattttgttgaagaactaatatgggcttatggatcaccttctggtggaagagcatcaggtgcaaagccggttaatatacatgatacaattttgcactattctaaaaactattctcaaagaaagcagaacaaaatttatatagattactctgataaatatgttaaagattggtttaagtataaagataaaaatgggagattatatcaaaaaagaatgagaggaaaagatgataatggtaatagtttatgggagaaacaatatttggacgagagtaaaggtgttccattatcaacagtctggactgatataaaacaggtatatgcagatcctagagcttacaaaatgaaccaagcaaatcatacagaactattaaaaagtttttctggtggtcaaaagccagaagaactactgaaaagaatcattgaaatgactactgatgagaatgatattgttttagattttcacttaggaaccggaacaaccgttgcaacagctcataaaatgaaccgtcaatatattggaatcgaacaaatggattatattaaggaatttacttttgaaagattatttgacatagttaatggtagtcaaacaggcatttccaaatccgtcaactggcaaggcggaggttccttcatttatcttgaactaaaaaaatacaaccagacttttattgaaaaaatagaagctgcggaagacacagcagaacttcttcagatttgggaagaaatgaaatccagatcctttcttaattataatgtggatctcaaaaagcaggagcagcacctcgatgattttaaaacgttaaacctgaaagaacagaaacagcatctttgcgaactgttggataaaaaccagctctacgttaatctttcttctttaaatgatgaaaatttcaaatgtactaatgaggagaaaatagttactcaagatttctataacattaaaaactgaaaccatggaatttttacacgagatctttaataatcctattgcgaaaaaatctttattgcaggttgttattcccaacgaaattacagacaatttaaaatttaaaattcgtccgtatcaggaagaagcattcaggcggcatctgtatattgaagaggagaattttgaaggaaaacccaaccaaccgattcatctgctgtacaatatggcaaccggaagcggaaaaaccatggtcatggcgggtcttatgcttcatctatttgaaaaaggctaccgtaattttctgttttttgtcaacagcaataacatcattcagaaaacgaaagataattttcttaattcacagacatccaaatatttatttacagataaaataatcattcatggaaaagaggttttactgaaagagattgacaattttgacgaatcggatcaggaaaatatcaatattaagttcacgacgatccaacagcttcatacagatttaaataataccagagaaaacagcattacgtatgaagattttaaagataaaaagattgttctgattgctgatgaagcccatcatctcaacagcggaaccaaaagcggaaatcttttcagaagttgggaagaaaccgttttgcagatcctgaatcagaattttgaaaatattctgctcgaatttacggcaactctggattatgaaagccgggaaattatgaataaatacagggataaagtcctttacaaatatgatctcgcacagttcagaaaagataaattttccaaagaaattaatcttgtgcgctcaatgtacaatgaaaaagaaaggattattcaggcactgattctcaatctttaccgtcaggaactggctgcaaaacatggtgttaatataaagccggtgatacttttcaaagcgaaaaaaacaattaaagaatctgaacagaacaaagaaaatttccacaagctcatcgatgaattttctgaaacgatggtaaccagcatcaggaaaacttcgtccgtctcggttgtacagaaagcttttcagttttttgagttaagaaatatctcggaaaatgatattgcacagagaataaaatcctgttttcgggaagaaaactgtctgagtgcaaacaatgattcggaagcggagaaaaaccagatccttctgaatacactcgaagatgaaaataacccgatccgtgccatatttgccgttcagaagctgaatgaaggatgggatgttttaaatttattcgatattgtacgtttgtatgaagaccgtgacggaaaagacggcaatcccggcaaaactacactctcggaggcgcagttaatcggtcgtggtgcgagatattatccttttgcactgaatgaaggtgaagacaagttcaccagaaaatacgatgatgacatttcaaatgatcttaaaattctggaagaactttattaccatacaaaagaagacagccgctatatttccgaacttaaaaaagcactggtagaatccggaatttatgaagatgaagcccatctcgaaacaaaacatttaaagctgaagcctctatttaaaacctcgaaattatatcagaaaggagtcgttttttccaataaaaaagtaccgaaaaattttgataatattaaatcttttgcagatttgggagtgaaaaaaacaaattaccgttatcagctttcttcgggctttggaaggatctctaatgtcttttcagaaaatgaaaaagaaatatccggtgaggaaaagataaagtcaaaagatataaagattgcggaaatacagaatcatgtggtaagatatgcgctcagcagaaatccgttttactgttttaatcgtctttctcattattttcccagccttgtttccatttttgaatttattgaaagtgagcaatatctgggaggtctggaaatcacttttacaggaagcagaagccgtcttgatgaaatttctcattttgattatcttcaggcgctcaatggtttattgcaggacatcgaaacagagatcaaaaagaattctacagaatatgaaggctcggaattttatgcgcggcctgttcaggatgtctttaaggataaagaaatcagagtaagtaaaggcagtgtaagagcaaatgggcaggaagagcttgttctggatgaaccatggtatgcttataatgctaattacggaaccgatgaggagaaaaagtttgtcgaactgtttgcgagacgttttgaaggactcaataaaaaatatcagaacattcacctgatccgtaatgaaagggaaattaaagtttttgatcaattgggacgggcttttgaaccggattttattcttttctgtactcgccgtgaagaagaggagcttacttttcaggtatttatagagccgaaaggaaaacatttaacaggacatgataaatggaaggaagattttctgaaacagatcggaaatcagcagaaatctgtgaagattcatacggacaactatttaattactgctgtacctttttacaattacagcaatgagaatgagtttaaggaaaccttagaaaagactttaatggagtaaaaagttattttgattaaattaaatggtttgaatttcagttgtttacattggattgtttgatctttgaaattattgtttgtttcaaataaatttcatatctttgcacccacttttgtggcgaaaaggtttgaagagtaaataactaaaaattaattacttccgtatttttcaattcacatttattcagaccgttgaaagagaaggaatacaaattttattagaattatgtcaaaagagacaaattcagctgaattattattaaatcaaaacgtagcacctgaacaatttgactgggattctttcgaatctggtcttgatgctgatgctagaaaagagaaaagcgatttagaagaaatctacaacggatctttaaacaacttagacgataacgacgttctaattggtaaagtggtaagattaactgataaagaagctatcgtagacatcaacttcaagtctgaaggtgttatttctcttaacgaattccgttacaaccaaggtcttaaagtaggagacgaggtagaagtaatggtagacagaagagaggacaaaacaggacagttacagttatctcacagaaaagcaagaacgcttaaagcttgggataaagtaaacgaacttcacgaaacaggtgaaatcgttaacggttttgttaagtctagaactaaaggaggtatgatcgttgacgtacacggaatcgaagcattcttacctggttctcagatcgacgttaagccaattaaagattacgatcagttcgtaggaaaaactatggagttcaaagttgtgaaaatcaaccctgagttcaaaaacgtagtagtttctcacaaagcattgatcgaagcagatatcgaaggtcagaaaaaagaaatcatcgctcagttagaaaaaggacaggttcttgaaggtactgttaagaatattacttcttacggtgtgttcatcgacttaggaggtgtagatggattgattcacattacagacctttcttggtctagagtgaaccacccatctgaaatccttgaggacggacagactgtaaaagtggttatccttgattttgatgatgagaaaacaagaatccagttaggtatgaagcagttagaagctcatccttgggatgctctttctgctgacttaaaagtaggagataaagtaaaaggaaaagtagtagttcttgctgactatggtgcattcgtagaaatcgctccgggagtagaaggattaatccacgtttctgaaatgtcttggtctactcacttgagatctgcaggagacttcgtaaaagtaggtgatgaggtagaagctgaggtacttactttagacagagaagacagaaaaatttctcttggtatcaagcaattaagcaaagatccatgggaaaatatcgaagctaagtatcctgtaggatctaagcacgtaggaactgtaagaaacttcactaactttggtgtattcgtagagttagaagaaggtatcgacggtttaatctacatttctgatctttcttggactaagaaaatcaagcacccatctgaattctgtgcagttggtgataaattagatgttgtagttcttgaattagacatccaggctagaagattatctctaggtcacaaacaattaacagaaaacccttgggatgcattcgaaactaaatatgctgaaggaacagttcacgctggtaaagcggtagaagtacacgataaaggtgcttctgtacagttcgaagatgctgaagttgaagcattctgcccatcaagattattagagaaggaagacggatctaaaatcaagaaaggtgaagaggctgatttcaaagtaattgaattcaacaaagaattcaagagagtagtagtttctcacacaggaatcttcagagacgaagagaagaaaaacgtaagagagaactctaacaacagatctaataatgtttcatcatcttcaaacgaagagagatctactcttggagacatcgatgcattagcagaattaaaaagaaaaatggaagaaggtaaataatacctgattcattttaaatattaagccactcatttgagtggctttttgcttttaaacaatagatgataatacctctaataatgcgaaaatttaaatttgatttattcacaaaataatgagaatttatttaatgttatcaaattaaatatctatttaaataattttaaatataatattgttttattgttaattatatgtaaattagcggctttattagtgtatatgaaaaaagtagctttaccccttttatttgtagtttctgcaatgtttccttctgttcttttcggacaggataatgagaagttaattaaggattatatttctcaaaataagatcagagaatataaaaaatcagatcttgcgaattttaagattgataatgtagataagtcaaagtcattgaatggaaatgtaattaaattccaacagacttataacggacttcccgtttacaatgcggaaggtactgttttggtaagagatagtaaggtaatttattatacagatacatttttaaaagattatacatcatctgtatcaaatactgcgtccatctcaaaaacaaccgcgcttcaaaaaatatctgaaaacttacagaaagaaaaaattcagaattatcctattttagggtataatgatgcagatttaaataatacaccggctgcaaaacagagattggtatatgtacaagataatggagctttaaaattagcctaccaattttcctttccggagccgaattctccaagctattgggatattttagtggatgcaaacacaggaaatattatcagcaaactagatttaaatttatcttgtaatttccataatgatgcctattctcatgattatagtcatgttcataatgaaactattgcagcaggaccgctaaagcaagaagaaagtaaaaatagtttttcacttttggcacccgataatgcttcttataatgtttttgcattaccgatagaggctcctacttttggttcccgatccattgtaagtaatccatggattttgacagcttctccggaaggttggcattatgatggtacaactcgttatacaattaccagaggtaacaatgtacatgcttatgaggatacatcagctttaaatgcgccaggtttttcaccagatggaggagctacaagaaactttaattatccttttaacattaatgatgatccatttaataatcagagtgctgcaataacgaatttattttatatcaataataaaattcatgatatcttctatatgtttggatttactccggcagcaagaaattttcagaatactaattttggtctaggtggtgttggtaatgattacgtacaggctgaagcacaagatgggggaggaacaaataacgctaactttgcaagtcctagtgatggaaataaaccaacgatgcaaatgtatctttggtcaactgtgaacagaatattttattataatgctccaacttcagcagtacctcgtcaaccaattgcaggcacagctttatttggaaatgcgttagatgctaccggagttacaggaaatgtgcagttatcttctgttttagatggttgtacagcaatacctgctggatctttaacgggtaagattggtttagtagaaagaggaacctgtaattttacagttaaggtgaaaaatgcacaaaatgcaggagctacagcagtaattatttataataacaccacaaatggtgatacggttggaaatatgtccggaactgatgcaacgattacaatcccatccgttttaatttcaaacactgaaggtgaatatattaaaagccagctttctgccaatacagctgtaaatgtaactctaaaaaatgatcctgcgagcagcgtgacaccagatggaagctttgataatggaatagtagttcacgaatatggacatggaatttcaaatcgattaacaggaactggcgcgggttgtttaaattcatctgcagacaaagaacagatgggtgaaggttggtcagatttctttgcgttgatgttaacaaataaagctggagataacgcttctgtaccgagaggtattggaacatatgctgtaggacaaggaatttctggaggaggtattcgaccggcaagatattctccagactttactataaatgattatacttatggtgatacgaatggaatggaatataccaatacaagtggacaaatagttcctgatgttcattccatcggatttgtttgggcttcaatgctttgggatcttcattggcagtatgttgctaagtatgggtattcttctgatgtgatgtcaaatacgactaatggtagttcaagagttctacagttagttacagatgctttaaaactccaaatttgtaatccaacatttattgatggaagaaatgctataatagcggcagatcaggctaaaggaggagcagacagatgtatgatctggagaacttttgcgaaaagaggccttggagtaaatgctgctgctggttcgaaaaccaatatcaacgatcaggtagaagattttactgttcctgcggactgcgtgttagctacagacgaagtaaatgttgttaaaaataacatttcaatttaccctaatcctgcgaaaaatgagttcttcatcaatttcccaagcaatacattaggtaaagtaagtgttgaaatttatgatatgtctggaaaactagtttcttcagaagataaaatttctccggatgctaagaaatcaatttcgacagacaagttgattaacggaacttacatggtgaaagtaaaaggcatcggtattgatgcggcatcaaaagttattgttaaaaaataatctgaacatttataaattttagttacggcgcgagcgaagctcgcgccgtaacttttttacattaatcccatctcattaatttaataatatatccgtacctttgcaggctgtaaaaaatgaattatgcagaagagaaatatattaaagggagttttatttgtagggattggagccagtatatacggaatgttggcaacgtttgttaaactcgcttatcaggatgggtacaccacttcagaagttacaacatcacagtttttattgggaatcgttggtcttttagtcttaaattttattcagacaatcacctctaaaaaaacattgccgtcgccaacatcaaaagaagtgagaaatttaatgttagccggaacatcattaggttgcaccagtttgttttattatattgcagttcagtatatcaatgtctcgatagccattgttttgctgatgcagtcggtctggttcagtgtagtggtggaaagttttctgacaaaaaaaatacccaatgcaagaaaaatagtttctgtaattattgttttggcgggaactattttagcaaccaatttaatcaacgaaagcttggatttggattggaaaggcattttctggggattattggcagcagcttcctatacacttactatgtttacttccaatactttagcaacacatttgcctgttttcagaaaaagcatcattatgctttttgggggggcagttgttgtttttgcattcttgttttttgcacagatcgggccgttgcacttcgaaggattaaaatctttttaccttacttttacagacaatacagagcatattcattcctttaattattcaattttatggaaatatggtttaattttatcacttttcggaaccataattccaccgattttatttaatgttggatttccgaatgccggactcggattaggaagtatcgtttcttctttggaactgccggtttccgtaacaatggcatttgttttattgggagaaaaagttatttttattcagtgggtgggaattatattgattctttttgccattgttttaatgaatcttcccaaaaaagacaaacaactagccgaaatatcttaaataaatcatcattaatacttgaaaaccgtttcttttggaatggttttttaatttcagtaaataaaatggtttatgaaatattacagaaatatatttaccgcattaatttttattacaagtacgaatcttttattgtcacaggtgaaaccactggatgcggaattaacgaactatcaatatccttttgaagttcagtttttaaatttcaaatctcagaaaaatgatctgaaaatggcctatatggatgttcagcctaaaaagccaaacggtaaaaccataatgcttcttcatgggaaaaattttaacggagcttattgggaaagaaccggcaaagacctttcagataaaggtttcagagtaattgttccggatcagataggatttggaaaatcttcgaagcctcaaagttaccagttttcattttcgcagttggcagaaaatacaaaagccattttggataaattacaaatcgataaaattattgttttaggacattcgatgggagggatgattgcgacaagatttactttacaatatcccgaaaaagttgaaaaattaatcctggaaaatccaatcggattggaagattataaaacatttgccacttatcaaaccatcgatcaggcatatcagtcagaattaaaaaatacagcagaaacctataaaaattatcagcttaaattttattacgacaataaatggaaagcagaatatcaaccatggttagacttaattgcaggatggacgttgcatcctgattacccgaaagttgcatgggatgcagccttaacttcagatatgatttacaatcagccggtttgctatgaatttaaaaacataaaagttcccactttgctcattatcggaacaagagacagaactgcgatcgggaaagaccgcgctccaaaagaactgcagcccaaaatggggcaatatcaggaattaggaaagaaaacacaacaacagattgttggttccaagctagtcgaaattgaaaacgtaggtcaccttccgcatatcgaagtctatgataaattctggaatgcgctgtatgaatttattgtatttgttattttaaaatatataattgtttatttagttttagaaaaagcaactttaaagagttttccagcataaactgctttttagagtaacattttgttttccttttgaatctcgctagatannnnnnnnnnnnnnnnnnnnnnnnnnnnnnnnnnnnnnnnnnnnnnnnnnnnnnnnnnnnnnnnnnnnnnnnnnnnnnnnnnnnnnnnnnnnnnnnnnnngagtttaaatggttgtccatagttttccacaagagtcgatttgatatttttagttctggaaaaaccgttgagtggggagtgaaatcatggaaaacagacggaaatattgagttctgaagaaaaattctgttggattgaataggaaaatggagggtttgaggatggaagtgttggagagaaaggagtttgtggggaaaaagagttaataggaaaaatatatttaaaaagtgaggtattgacttttgagatcgtctcttttctttattatatatgtatttaaaaatcagtataagagaatctcttgaggcacctacaaatgaaaagtctgtcggtatcttagtaaggcttctgaaattcctagccccgatagaaacggcatccttttgggttgcgggcggagcgaagcggagcccgtaacccaaaagataaagtggatagcgggaaatagcttcttataaaaaggaggaaaagtataggtgtagacggactttaaaacaaccgtgatatttcctgagatttaatagccattttctgaccgtaataataaaggaaatatttttcgaaattaaagaaatcgcttttctaagaacttatagatatagtagccgatgagacagccaacggtgtctgccacaatatctaaagtttccatcgatcttcccaatcccatttcttgctgaaggatctcggtaagaaatgcatacagcagaatgatctggatgaaatagtaaaaacggatttttggaaaagcagcaatgaaaaagaaacctagtgctgcaaagatgcttagatgcaaaatcttgtcaataccgctgaacataaaccaatactcatggttttcttctcccggtctgagaagcatataagtaagaaatgcccaataaatgggcaatatcttactgaatatttttgaaatcttatccaatgattgcctgatattcttccgcagaaagtaattctgaatgatctgcaccttcagcaacttctaatttgatgatccatccgttcccataaggatctgaatttaacaattccggctggtcttccaattctgagttgaattcgatcacttttcctgagataggcaagaatagatctgaaactgtttttacagcttctacacttccgaaaaccgcacctccttcaagatcatcatctacagtgtctacatctacgtaaacgatatctcccaattctccctgtgcgaagtctgtaataccaattgtagcaacgtttccttcaatcttgatccattcgtgatctttcgtgtactttaattctgatggtgtgttcatttttaattttttatttgtacaaatgtattcaaaattccagaaggttcaaagctttcataatgatcttctttaaattttgaaccaaaataaaaaatcgctgctataacagcgatttcttttataaaactatcatttttttataaccttattaggatatatcttaccatttacatctattaaattaaccatgtaaatacccgaaggatatgctgagagatttatttcaacaaaatttatggttgatacatctttggttattattttcttggcatcaatagaataaacttctaatgttttgaaatttcttccattaaaatctatatttaatatgtccttagttggatttggatataattttacttcacggtctataataatctcacgatttaaactagaatcattaagaacaatttctccatagtatggcttatcctttaaattaggatttccttgtttcatatatattaattcacttgatatctctgttaattgaggattaagcatatcctcaaacgtaagtgaacaactaggtagatcattcggaaatacttgttgaggtatagcatgaaactctactcctgaagaagatgaaacagaaaaaccaggcttcatatctacagaatatttgccatagacatatacatctttattccctgagagtggttgtgttttattatcaaggatgactgttttcacatcataggttcttgtattataatcggagagaagataagacggagttgtattaagagctctgaataaaaaattactgacattattcagtattagattatcaaaaactttttttccatttaaaatcccatgatcgaatgcatcattagttaagtttttaggacgatgataagctgcagagtatattgttgaattatcatacatggtgtatggatgtgccaaataatcgacctctcttatactaaatactctacgtataccataagaagtgttaccataaacaagatcattacttataatatattgattattaaatccacccatttctgaccatttaaaataattcactttatctttcagccaatttccattagtatcagttttaaaatttatatactgataattaggatattcacctcctgggtttgatgaccatgccatcttatttagttttataatttcgttacctctcattataaaatcagtcctatatgcacctgaataaggtacatttttaaaatctaaaggcataactaaatgagtcgctgaattattagataagtttaattgcatcatttcatagactgcattatatgtgtctccttttctataaataacattgtactgattgctagccttttcaaatattgatacgccactcggatttgacaagaaaatatttgacagtgaagactgtaaatttatacttggtgagtttgaagctaaattatagatatcaagcttattttgtccataaggctgtacaaaaactttacttccaattattttaatagaaggtgatactccataagaaataggagtactattcatagtccaaactccattttgctcattataaaagcatgaatacaatgaatttgatttgtttaatattaaatgtccattatcaaaactataatagttattaaagaggactttgttttgttggttataaaataaggtcaaatagctttcaaatacaagctcattattcacgattttatatgactgaagctcagaagttgtattaaatccggggttcaaatatctagtttcctgaacaagaatgtgaactctgttttctgtaataccaaccacatcaacaagatatgtatcatctagtactccaatacttcccgggtttttcatggtaatttgagctggcttaatatatttaagtttattacaatcgattattttataaattccccaaagcttcaaattagataaattattaagaacattagggtaaaataattgatataaattttcactaaccgcaaatatatttttattatttggaattacagattgataaaaataatatttgttgtcaggctgctgaggagcattttgatttaaatatatttttttcccccatgtattggaaggatgaactctttcaccatttaaatcaactggctcttcttcccaagtagttcctgttggcggattagtaggaggaaaaacaacagttattggcggcgcaggtgaacctatcagaagagaattatttggacaatatggtcctattgactgcacatttgccccattgggatttaaccatggagacatggtataataattattcgaaaaccttgaataatatgtataaaacgtagggccggttgaattataaatattaggagcatcacaattaaatttacttggatcaggacctactgacagggatcctaccaatctgtcaaaactgttaaataatggagatcctgaagatcctttctctactataccacttctccatgaattttgtaaaaaatttccttgggaattttgtgataatcccatactataatatccaaatgatcctgatagtaccgttgaattataccccattaccggatatatactattaacataagatattttttttgtatctccctgtggatgatgtactccatatgagttagtcggatttaccgaatatgcatttggattattatcccatcctgcatagcaaactctatattgtgctaacgcatttgctgaaccattaagttttaacaaagcgtaatcattaacattaaatgaactttgagtcaataatgtacaacctaaaacagaattatttgataattgatagggagcatttgaaccattacttgcacaagttaaagcttcataattaaataaagtaattaattcgttactccaattcgcattactattggcagcttcatatcctatgcaatgtgcagctgttaaaaagtaaggttctccattttgagcagtattgttcatcaaatttccagaacaacttgctgaatagttgtgcgtgtttgttcctgactgataaatcggataaagcatcaaacctacagacttgatatttctaaatctatctgtagacgacccattgtcacatgctatatttttatggcagttacctgcggtaccgtatgctccaccataaaactcggtgaaagagtgaatgattttatccgctatgagcaccggtttgtctgtactacctaccggatacgaaagctcaatataaaatgtatttcctggtataggctgtatcccaaattctaatccttggtcttgaccagacggattatttttattattaaattctcctaatataaatccgttatccgcataaaagaaaagcttactatcctgtgttaaaagatattttttaaaataaatttgcaatgcttttgcttctgaagaagttattttatataaataataatatcttccataatattcaattctgttgctgtcatctgaaatgtcaatttcctgtttgaaaactttcccgtaaatattctgattgatatattctttatcatttaattgagaaacttcagttgttatctgctgattattgaacccttgaatttcaaatgtttttatattttcttttaattgtgacagaggaacaatatcatgagaagcatttatatattcttctctcggcatacggttttgaagagatagcttttcaaataaaaacggatatccgctgtcaccaacttgagattttacaaaatttaaacagaataaaaaagctataattaaatatttcataactttcattatttagttttaaaattcttttttaatttctcaatttcttctgcttgcttcttcaattgcttattctgctctattgtatataacgttaattcttctattttttgtaaaagcttaatctgaaactcacctacatttaccccttctttttccatttgattagcagaagcaatttccggcaaatgcttgttttctttaatatgtttttcaacatcttctagcttgggaagtttataatcttcagcaaatacaaaatctgcagtaggtgtaagagtaacttttatctcttttgcttcaaactttccttgaagagcagcgttaccgtttggtttgagtattaatacttcctgtccgggtgatccattatatccaacaaaaaaacgatgttgtccttgggaaaaataatctaagcttcccgcacttactccaaaaccaaaataattgtttgatcctgatgaccatagtgctattttattaggaaaatcagaaggattagaaaaatttgcccctaaatctaacttactcacaggaatagatgttcctataccaacatttccagaatcaacattagaagtaattgtagaactaaatgatggcaaagtgctacaaataatccaccactgagttccattagatttatgtaaatcaaattcagtttgactggttataactgagctatattgcgtgaagtcattaccatcaaattgttgagtaaaataattccccttaacaacagcttgagcatgccaactgttatttatttgattattcgcattatattctaatgtatttacaccatcccaaggaattacaaaaacggaaaactgtactccaggattttttgcagctattattccgtacccggttgctcttgcatttaccatctgcttttctgttaatgtctgtccaaaaatattagcgcaaattagcatagcgcagacaaataaagattttctcataattaattatatattattttaataaatatcaaaataaatctctcacgattttaaatgtaaaagtttaatttgattgaagtttagtttgattgaaatttagtttaagaaataagatagaaatgggaaatcttatagaaattttgcttcatttaattagttttaacaaatataaataaaattccagaaggttcaaatatcggatataaaaaatgtccctcaaaaactgaaggacatttaaatttattttcgttctaattagaaaccgcctgagtctccgaatgtaaacgtggcagaaataccagctctgattgttgacaacgggaaggctgttgagattttatatttagaagtcatctgctcatagaatactctaagattaaggttctgtgatacattataatctgctgagactttaatgttcatcaatctctgaccgcctgtaacctgagaatcatccagtaaaatgttggtgatgctcgttttgctgtctctcagcgagaaatctcctctgatgttcaggtcacttccttttgcttttcctcttccgcgtacgttcgtcatccctagtctgaagtttctgatgatataccctacccttactacatattcgctgtttgaatcttctgttaaggtatggtttaccaatccgagtaacaatgttcttaatctgttgtactgaatacccaactgaatattgtttctcatcgtcatatctactccaatcaaaggtgagaagttttctacgtaacctacctgagcaaaagtgaacggattgatataatcgtcattaatatctctctgcgttgcatcgtaagcattaagactgttgaaataatcgatactggactgaattcctgttgctgtgtaagtcgcctgataagaatgtaaaagatcaaacttggagaactgtccgttgatgatcgggatatttctcaaccctgagtaagtgatcttccagtttggaatcggaagtcctgcttttttaggattcgtcatttcttttactgtttttccttcaaccgcagctctgaatgccggaattaaaatataggcatttgaaattccataaccgtctttgaatccgtttggctctaaagcgccctgcttctgctgagataaagcctgtgcattctgtcttattgcttgataaattgccgctccgtctttgaatgctgtctttaataaaacaaccgagttggaataggttaccaaatcatttgcaaatgtgtagttcggattggcaactcccgtattcggatctctgtaattaaatcctgtatgggtaaagtttcggttataattatgcagtgcactgatgtctattctgagatcattcatcggcataacctgcaaattagcccgcagctcgcgtgtcgacattcgtacataaggatctgtcataaattcggaatcacttacccatccgttttccattaccgttcttctgatgtctgcctgagatccgaaaaggaacccgatggttggacctcccaaagtctgtccgtaaccataccagttcggagccgataataatccaggaagcactgttccattgttttcagaataattgatatctaactgcttcatggaggttaacaaatacgccatgctctgaagcggagtcagtctgtttttaaatttatatcttttataagcatatctgtttttctcccactgctgcgtatatgcattgtttaaggaatctatttcctgcttacgtttctgcaattttgccgaaatatttttgaaatacttaaactgcccaaagaacttcgtgaaatctgccgttccggttgcctgaatgacattcgtattctgaccgattgaacctaagcttccgtccggacttgccagtaacactgtagatcttgcattccagttgtaggtaaatccgtaacctaattccgcatcgatgaaatcgagatatggcagatactggaatggtaatttatagtttaactgaactctgtggttatatagtacaggtctacccgctcttaatacatttccgaaaatagaactgttgtccattgtattaacgtccacattgtcattcaatgttctggttgccgagttaatttccagttttaaagatttggtaaaattaaatcctaaaccgtactgccatccgaaatagaagtttctgtttttaatcgctgcaaaatcatctccatagtttcctgtaaggatggcatcgatatttctaaactgcaactcgttgtaatttctgtcgatttctgttctgaaagagaatcttgtaggaacaggattaaagttaaattcttttacccatctcagatatttcgtagacttcgccgtatcgctgatcattttattgaacggacggattacccaaggtttgaaggtgtagttgtaatctacataccctctcaaatactgtctgtaatttttcttggtataaacatctctgtaataatcgtcgttgtaaaccgccgttaccgatacgttttcgatatcgtagaacttaggcttcctattcggattcattctttctttatgcatattcacaacgccgatgcttctttgctgtgtataagttcttgctacttttttaagctgctctttgtttgctgctttcttaaactcaacatctgtatccagaggattgtactttggatcttcaatggtctgcgaataagaatagtttaccggaattttaactcctgttttttcaggtaaaaatttatctacatttactgcggtattgatgctgaatgcagactgagtcgactggtttctttcggcaggtttagaatcaatatttccaaatcctactgaagtataagaagcactagtgtttacggttgcaaaatctcctaggttgaagtttaagcttgcatttcctgcataccctccgtcattttctatttcagagagacggatttcgtttacccaaaaaattctgtcgagcgctacggatccggaagaccctctatcaaaaccgtttctgacaccaatcatgatggtcgtaatatttcctaagcttggacgtcccttgatgtaaagacttttaaaagtattccccggatcaaaaacctcatcttttaatctttgcacaatttgcgtcgggtgatttttatctcttcttattttagcatcaacaaaatcctgaatatttaaatccacatcattttccatcggccagatttccataggagccgttgcattcgctggagtaatctttaatgaggattcatattcgtagtagttatctgtagcatcactacccaaacggatgaagaatttagttttcggatcaatttgcccaatattcaaatcagagtttttaggatcatgagcatgtacaaaaagttttaattttttgtatcttctcatatccagagaagtatttttaaatactcctctcgcttcagatggagcaagggatgtcgtttttaaatataaagaagcttcattctgtctctgtgcccctgcattaccacttaaaatctgtctgtcgattcccggaggcaaaacgtaaggcggctggttcagtgcattttcttcaatatttacacttcccacttcgaagttattattgtctgcaggagatgttccttcatctgtcgcaccagaattaccggttgtagcaatatttttaggatattttctccagtctgatctcaccaaatccatggttccgaatcttaatgttgaagtctggtcgaaacctgttaataataatcttgcaaatcttacattattcaaaatagaagcatcatgatctcctgccgtatttacgtactgagaaaccggaattctgaacaaataccattttacctgagaagtctgcccattctggaatgatgcctgaactgttttaacgtctacgatattattctgtcctaaagtaaggcttcccggcgttaagcttacctcatactggttgtagctttccgtctgatctaagttgtaatctttattaatatcttctgcatctggagtctgtgaagccacttctaaagagttgctctgagagtttccttccggatttctgaaatacttgtatcgctgtaccaaagatgacgcctgagttccggtgaatttttcagacatgtagaatacaaaatcatctacagcaggatcggcaatattggtaaccggattgatgaatgtatttccgaacaatgccgcttcctgatccgaacttaaaccgtcataccccaaatcctgagcggttctgtctgcaccttcacttgagaacgcataaagaatcggtggctgctttggctgtgttccccagtttgaagccgtagtggtagaaggagctgaaggcgttggcaatccgttttcgtactgcatctgtccgtctttaaggatatcttcagaaacgtttcctaaatgcagtaaaagttttggattggtacccaaagtatttccgtctgcataaggatccatcatccagaattcaacatattcgatgtttgaacttgaaaaatttgaaaccgaaatcggtctcatgatacctgcccatctttgcgcagtagtttccgtattagggtttgtgttataaggtcctttttctgcaggataatacgaaatatcaaaagtattggtatacgtctgttctcctgctacaaaatctctgttattataaatttcagagaactgaactcttcttgaagcgtgattggaaaccgactgcggtgtgattcctgtcggagcttttcctcctacaccgtaaaatcttggatcgatgttataccatgataacaaacctcttccatatccttctgttctgtcattattttttcctgctcctgtaaataaaggatctgattgatttttttccggctttgaagctaaattccacgctgtaggttcttttaaggtaatttttgaagtggtctgttcaaaatcatcaatataagactgatcgttgattcctttatttaacccgggaagtaaataagctgcctccattttgaaatttagattggaaggtgcttctgtatttaccaaaggtattttatctgttaatctcgtgaggaacggaagctgattgttgtacattaaattgattcctgccattgtattattaacagcttcctgaccatagtttactttttgagtaagcggtgattcggaatagtttacaacggttcctcctaagataaagtgttcattgaatcttctttctaaattcaagcccatgaatctctttctctgggtattgaatgttaactggttttccagtgaaatattaattgcctgtccggattgttttacctgctcattgatgatggtaacggttcccaacatataatctacggtgtaatctatcccttccgttaactgaactccgtttgccgaaacttttacggaaccttgaggaacattaacagctcccagagaaatcccctgtccctgaacacctttataacgaccttcaatggtgtaacgttgagataaattgcttgattctgcactgtttgaaccagttttttgtaaagtataaagatcattatacacgtactgtggatcgttacttccgattatattctggatatagcttccaaatggctgaactttagtaaagatcactcttcctgtttccggacgtatggtaattccgttaacaaagtcgaaaataccgtctcctgttgaagttccattattctgcaaatctccgttcgcattcagtctgtcccagtttaataatttaattaaaggtacattgcttacctgtggattattggcaaccggaagataatttactttacctccggattgtggatctctgtataacacgttcaggataaatccgtcatgattaacctgtccagcatccagagaatagatgtttttcatcatcagattccacatcggcgaagttgtttttaccgttgtattcggcttcagaagtttcgccattaaaacggtactttcctcggagaattccccgactttgtacacctgattgcttccgttcaccgtataggaaaaggaaaccgctaaaagctgattatcattcagtttctgatttaatgaaatgtaacctaactgcggttgtaaggtatattcgttggtatttaatcttcttgcttttttattgaagataaaatgttcaccatcctgataaacttctgttgttcctgtcgcaacaggaaggttctgtcctttgatggcattgtatgcagtacttgcgtctctcaaccccggtaatccgttgatcgtggaatataggttgaaacccggctgattgttatcgggaagaactccgggagcatcccctaaatctctgattccgacaatacttttctggtactgtaagttgctgttcccctgatccagaacccagacttccaatcttgtaatgctgatcttcgaattgatctgaggataatttaataaagcgccgtcatatttatctaagaaataatgtcctaaaaagtagtgctggttgtcttcgtaatcaattgcatttaatttaaatgtattcatgacaccgccaccctgaaccgtaatattccttgcttccccctgttgttgggagagcacaaccgttccgaaggttttacctaactgaaattctgttttaaccccgaatagagactgagagcctcgaatgagactagtggaaagcggcatattaacattaccgaattctactcttttgatgattttgtcctctcctcctgcactcggcttatctacatcctgcaaacctttctgctgaagatctttccagcttccttttgcctgccatacgagattcattctgttctcaaatgcgaaaccgctctgggtatcataattggcttttaactgaagattttcccctacttttcccaataaaccaagctgaattctctgatcgatatcaaacgtaaaactcttcctgttttgcggtaaaatcagcgggttatcaatcttctgatacaatccggctaaatcgaaagaagcatatcctgaaggaatgatttcgattttattgctcccgaaaatggtttcaaaaagcctgttgttgatctgtaatgaaggaattaaaccttttctcgccgcatcgcttttatctttacggaacatgaggctgtaacgatctgatttttctttgtaataagctttcgtctgcgcttccatcatgaattctttgtaatcttccggagacatcgcagtcggctgtcctgttatggtatttcctactttaggatatacgaaatacattcctgtttttatatcgtagtaggcttcatactgtgtaggatctgccaactgataatcttttttgataattgcggtatcgcttacctttgctgcaggccgtctttgtgcaaatgtaaatgtagacacaagcaaaaacgacaggaacagaattatattgaaatatttattattcgccaccaaatgttaaatgttttttaaaatttgttttaccaactcttctactgaaatattaggatcctgcttcatgattttatccgcaagtttctcgctcattcgcttaggaatgcccaaaacttctaatgcagataacgattcttccttgattttattatttgcaaacgtggaaatgttttcttccggattgctgtatttctgtactttatccttaagatccacaatgattctttcggctgtttttgccccgattcctttggctttctgaatgagtgcgctgttttttgagaggattgccgaagcgatctcatcaagacttaaagtagacagtaaaataagtgctgaaacggctcctactccattaacgcttattaacagattgaacatatctttctctgaacgagtgttaaatccgaatagcaaatgagcgtcttccctgatgatctgctgaataaaaagaaaagtttctttattggttgtgagggtttgtgaggtcattaaactgatacctacatagtaaccaactccttgtacgttgattactgcgtaagtaggcgtaagttcctgaacaatgccttgaagtgaaaatatcattattaatttttataactcccaaatatagtaatttaaactaagttatgttttcatttcacgcgcgaatgatttttaacttaatttttaactgtaaatgcaataatttctcaaaaaaaacgaaacccatccaaatggacaggtttcactttcttactttaattttacaaaaatctacaccggatttatatccagacacatactgatgttgcaggctccgtttacgcaggtgggtgtacatcctaccaaacataactgtccctgagaaggaagacagtaatatccaccttccggagactgtaatggttttcctccgggtccgcctcctgcaatctgtcttaaattttctcttgaaagttttttgaaatttttcataatgtaatttttggttctcctaaagtatttaatttacctaccagttgaacagatatttaaataattaattctgaaaatgtattttacaatttattttacccttaggaaatttagtattcataggtatttcaaaagattttcaaaatataaatttacctgtcctaatatcacaaaattgtgaaattaggacgcaaaaaaaagcagtacaccgttattttgtgtactgctttctatcttaaagaacagattttttattatttcttctcttttttctctcttctttgggcatccagaacggcaatggttgcaaggtttacaatctcatctacgcttgaacgcatctgtaaaacgtgaaccggctgtttcagtcccatcaaaattggtccgattacctgtgctactttcattcctctgatgatcttgtaggataagttggcactttcaagattcgggaaaatgaatgtattggcaggcgttgttcctaattttgagaatggataatcgcttaagtgatctgaattcatcgcaaaatccggctgaatttctccgtccacgatcattttcggatatttttcgtgaaggatacttactgcttttgccactttctttgaagtttcggagatggctgcgaagttttcaaatccaagcatggcgattctcggttcgatggcaaaagattttacggtaaactctgccattttagcaatatttaccaagtcttccgccgtaggattctgattgatggaggtatctgcaaagaaaatgggtttcttttcagacaaaatcatcatcattgccgctactttatctactcctttatctttttcaattacttctaaaactggtctaagaacggaggtataatttttagagaaaccaacaattaatccgtctgtatcgccatgtttcagcatcaaaggaccgaaataatctctctggcgaacgaatctttttgctttgtattcgttcattccctttctctggcgaagtttccaaagtgtttctctgtatttttttctgttttctttctgatcgtcgtcgcttggatcaataatcggaatatcaagattgatcccgaaatgttccatctgctccttgatgtattttttatttcctaaaagactcggataggcaattccttcttcatatagaatctgtgccgctttcagaacgttatattcctccgcatttcctaaagtaattcttttcggattggcttttgcacggttctgcatcattcttaccagcttctcgtctcttcccattctgtcgaggaggctgttttcgtattcttcaaaatcggtgattgtctttctggcaattccactttctacagcagcttttgctaccgcactggatacttttgtaattaaacggttatcaaacggttttggaataaaatattctcttccgaactgcagattctgaatgttatacgctaaaattaccgcctccggaacaggctcttttgccagatctgcaatggcatgaacagccgccagtttcattgcttcattaattccttttgcctgaacgtctaatgctccgcggaaaatataagggaaaccaagaacgttattaacctgattaggataatcacttcttcctgttgccatgatgacatctttgcgggtttcaagggctacattgtaagcaatttccggatccggatttgccaatgcaaaaacgataggattttcgttcatactcagcaacatttctggcgtcattacatttccttttgataatccaacgaaaacgtctgaaccttttacggcatcttccaatgtttcgatgtccgtctgagcaacaaaatcgattttttcgggagtaagattttctcttttgtggttaatcactcctttactgtcgcacatcagtacgttttctcttttcagaccaagagaaatataaaggttggtacacgcaattgccgctgctcctgctccgttcaccaccattttcacttcttcaatctttttattggcaatctgaagagagttgattaatgctgctgcagaaatgatcgccgttccgtgctgatcgtcgtgcatcaaaggaatatccagttcttctttcagtctctgttcgatataaaatgcttccggagctttaatatcttctagattgattcctccaaaagtaggagcaataccttttacaatttctatgaatttatcaggatctttttcgttgatttcaatatcgaaaacgttaatgtccgcaaaaattttgaacaaaagacctttcccttccattaccggctttgaagcttctgcaccgatatctcccaaacctaaaactgcggtaccgtttgaaataacagctaccagatttccttttcctgtataatcgtacaccgtttcgggcttatcgtggatttccatacaaggaactgcaacccccggagaatacgccaatgacaaatctctctgagatgagtgtggttttgaagggatcacttcgatcttacctttaggttcggctttatgataatctaaagccgcctgattaaagttcttttcgtcgcggtgggttttacttgacatataatgaattttgttattttaattataatatatattgaatgtggtagcttacgagactttcgataggcttctgaacaatctgtcccacattaagattaagctctgccgctgcagaacgtaaaacatcttcataataataggctattgatccgatgaaattgatctcggaatctttggcttctaagtaaggaagtacctgataatcgaaaaaattaagcatttcttcatgcaccattttctgtaaatacggatgatcttttctttcgaccacgaatttgttgaaatctgccaaatatgcattcggtcttggagtgtgatacatatttttaagagcctcttccacagtcagcttatacgtttcttcaaactccgatgaaaggtctgcgggaagcttctgcataaagaatcttcttaccagttgttttccgattgcgcttccgcttccttcgtctcctacaagaaatccgagagaaggcaactgaatcttaatggtttctccgttaaaatagcaagaattggaaccggttcccaaaatacagacaatggcgggctttcctctgtaagcggcataagctgctgctgtgagatcctctttaacaataatttctgcgccgatgaatacttttcccagttcttctataatgatatcacaattttgctgaacaccacatcctgaaccataaaaaaagattttcttaatcgaatttttaacggtggtaaggcttgtatttttttcaatttcaggaacaataagttctttgttgatgaagtttgggttgaagccaatggtttctgttttcaggaagacctttttaaaatcgtccaaaattacccagtcggattttgtagaaccactatcaacaatagcaaccatattttacattttagtttaaggatgctaaattatgaatttatcttgtaagatgacggattctgaacatgacatatgtgttatttgctttcagcaattattttaaaagcttatatgccattatgattttacatagaaaaaccgcaggaagttttctgcggttttatttttatggatttaatcgtctataaaattcattgattatcttctctttttctttagcctttttattggagttaataatattcatagagaaacttgcaccgattggattatatccaagattcaaacacgctgtattaattaaattcgctgttaaaatagaagcatacggatcaaacaatttattttcttttttgtagtcttctacaaaagttagatacttaggatcattaagttcctcgttgattttatcaacatcttttttagtgacaacttttttcagctttaacaattctttcatataagttaagctatatagcttcattcctatactggtttttgattgaattgtatctgtgttgtaacctgtcattttttgcttcgttaaatgactgatattattaataatcgtaagctctttattaccattctttttataaacaaatattctaaatctgtcatcaggatatggctctgttgttaatggaatactatcaaggctttccaccttcataattaccatatcagatggattttcctttacatcccaaattttataatgatttctatatttcttggttgtaagttgctgcaaagaaaatgtggttgatgtatacaatgtatcattagaacttttatatacgtacatttcatctggaccaataaagtaataaggctctttgaagatttgtgcactgcattgttgataaaatacgcatagtataagtataaaaatgtaatttttcatattcaatttttgtttttaattacaaggtataggttttacgattccgttttctaagattaatttattccaagttgttaaatcttcatcggctttgtataaaaaacacggttgttaaaaccgtgcttataatttattgctttataaagatatattctcctcccggcagtttaaannnnnnnnnnnnnnnnnnnnnnnnnnnnnnnnnnnnnnnnnnnnnnnnnnnnnnnnnnnnnnnnnnnnnnnnnnnnnnnnnnnnnnnnnnnnnnnnnnnngtgaaattttgtggtctttaaaaacggacataaatagttaattatcagttataaatatatgaaataaaaaccaaaacaacaattcaattaattgaaaatcatatagttaaattaaaaaaaaacattattcaaaataataaaaaaatcttccgaccatgactagcaaagccgccgccgaaacctcaaaaagagctcacacatgccgctcaatctgggctaaaatacaggtctgcaattttaactttctccgtaaaatatttaaactcaggaatttattatttacaacatagttaaatttcttacttggcattaaaattttaaaaacgttatcattttaacaaatatttggcaaaaaatttgatattgaatcaatgcttattggtaagatcataaaaactaataatcaaattttttttaacagtttaaatattttagtgatgaaacacacaaatcaaaatcaggaatttcgttttaacgaagttcttttcgaacaccgtaacaaagaatacggagcttatgtattaagaagagaatcagacagaatcttaacaaaagcattttttataggagtcagtgtattggctgccgtttctttaactccgcttgcgattaatgcatttaaaagtgatgtaataagtaccgatgacggaggagttgtgatagagtttgtagatccggttattccggatgatgttgtagtgacacctccaccaactgttcttccacaaaaagtagatcccgcggttagaacttatgatagctccgttcctacaccgtcaagacaagctccggatactaatacggaaaagattccggatgatgcagttgcaggtttaagcaatgattttaaagcgccccctgcgccgcaaaatacttatgttcccgtagttcctacaatcaatacaggaccgatttcagtaactccatctccaagagtagagcctaaagttgaaaatcctgaaggtattccattaaaggttgatgaagaagccgcttttcctggtgggatagattctttcagaaataaagtaatgaacaactttgataattcaggacttgatcaggatgaaatcatgaaaactgtagttacatttattgtagaaagagatggatcgatttcaggaattaaagcagacggtaaaaatgtagatttcaataatgaagctttaagaactattaaaagtattaaagggaaatggattcctgctaaaattaaaggtcagcccgtaagaagttatttcaaatttccgatcacgatgaaatttgatcaataagacataaaaaacaaatcttgaacagttatccacaaagaattttttttgtggataattttttttattgctaaattgcttattaacaatattttaactcaaatttcgttttatccgcttatggagagcagggaaaaatgtgtatttttgaaacttaaagttctaacaatggcaaaaatcataggtatcgctaatcagaaaggaggagttgggaaaacaacaacagctgttaatttagccgcagcattaggggtattagagaaaaaaatattaatcatcgatgcagatcctcaggcgaatgcaacttcaggtttgggcgtagaagacgtaagatattctacatacaatcttttggagcatagtgtagatacggcaaaatgcatcaagcagacggcaactccgaatctggatattgtgccttctcacatcgatttggtggcagcggagattgaacttgtcgacaaagaagagcgtgagtatatgcttaaaaaagctttacagagcgtaagagacgattatgattatattattatcgattgtgcgccgagtttaggtcttattaccgtaaatgcacttacagcagcagattctgtaattatcccgattcagtgtgagtatttcgcattggaaggtcttggaaaattactgaataccattaaaaacgttcagaaaatccataataaggatcttgatatcgaaggtctgcttcttaccatgtacgacagtcgtttgagactatccaatcaggtcgtggaagaagtgaattctcatttccctgaaatggtattcgaaaccatcatcagcagaaacgtacgattaagcgaagcgccaagctttggagaaagtatcctgaattacgatgcggaaagcaaaggagcaatacagtacattcagttggcagaagaagttttattgaaaaacgagaaattagtaaagaattaaaagcagctagctaagctaaacgctaaaaacaaaatatgaaggataaaaaaagagcgatggggcgtggtttgggcgcaattcttagtgccgaatccaaagcaacgatcaattctgccaccgatgagggagcagataagtttgtagggaatatcgtagaaattgcattagaagatatttatcccaatgcgtctcagccaagaacttattttgacgaaaaagcattgaacgaactcgcacagtcaattaaaaatttaggcgttattcagccgattactttaagaaaagacggcgaaaagtttgaaattatttccggggaaagacgttaccgcgcaagtaaaattgcaggtttggagtctattccggcatacatccgtctggttaatgatcaggaattgcttgaaatggcacttgttgaaaacatccagagagaagatcttgatgcgatagaaattgcattaacgtatcagagattgatggaagagatcggtcttactcaggaaaatctcagccacagagtagggaaagacagaagtaccattacaaattccatcagattgctaagactgcatccagatattcaaaatgcgatccgaagcggagagatttctgcaggacacggaagagccatcatcagtcttgaaagcgaagaacatcagcaaattctttttgatttaattatcaaagaaaaactgaatgtaagacaggcagaacaggcagctacagccattaaaaacccgaaatctccggcagcgaaaaaagcaaaagccgagctttccaacaattataaaagagcgcagaaaacaattgcagatattttagatgtaaaagttgaaattaaagcctctccaaacggtaaaaaaggtaaaattgttctggacttcaaaaatgaagatgagctggaatatattttatcccatattaaataaatgaagaaaatacttttcacattttttctgtgtctgtttgcagttgcgtattcacaggtaaatcctaacgacaccattcgggtagactaccgtccgaaagacagtgttgccgtagaaaaaaacaacaccaaaacagaagcaaaggttgttgcagatctggaaaaagcaaacggacctaccaaaaaaacactgaaactgaatcctacaaaagcaggattgtattctgctgtgcttccgggattgggacaggtgtataataaaaaatactggaaggttcccattgttttaggagcagtaggagctggagtaggaattgcggtatggaatgacaaccagtacagaaaatatcgagaatattacatcgccaaactcaacggaacaccgaatgaatttgtagatacccatccatggctcgacaaggtggctctcggaaatgcacaggacagatccaagagacagagagattacgccattgcaattacaggattaatttacattctgaacatcgtagatgcggtagtagatgcacatttatacgaagcaaggcacgatccggatcttacgctgaatccggcaatgattcaggatcagtacggaattgcacctcctaaaaccggcttaagtttaagttacagattttaaaataattaatattaattctgttaaaataatttattgctgacttggttaagtgaaaccgaagattctacgaagtcaaacacctttgcgaacgaagaatatggaggagaattttaaagaaatctttacgggctttgcgttagattataaaattaaataaagaagtacatgaaaatagcattagttggatacggtaaaatgggcaaaatcattgatgaaattgccactaaaagaggacacgaaattgttgcccggttaaaagaaactccaactgctgaaaatctcaataatcccgatgtcgtaatcgaattttcgttacccgaagttgcttacgaaaacatcaaagcctgtctggaaaacaaaattccggtgatctgcggaacaacgggctggcttgaaaaaaaatccgaaattgaaaaactggctgtagaaaaagaaaccgcttttttatatggttcaaactttagtcttggtgttaatttattttttgccttaaacgaaaaactggcagatttaatgaaaaatgtggacgaatattcttgtcagttggaagaaattcatcacgttcacaaattggatgctccaagcggaacggcaatttccatcgccgaaggaatttttaaaaacaatccgaaattcgattcctggaaactggaagaaacgcagggaaaacaactgggcatttttgccatccgtgaagatgaggttccgggaacacacagtgttttttacagaagcgaagtggacgaaatcgagatcaaacataccgcgttcaacagaagtggttttgcactgggtgcagtagttgcggcagaatggattaaagataaaaaaggaaatttcacgatgaagaacgttttgggactttaattttgtaacaaaattcttacattgcaaactaataagagtgaatggtgaagtgttaatagtgaatttgtgatcatttatcagacatcattcatcaattatattatagattaggcacaaaaatttatgaattattttttaacgtacgcagtttatgttctcattttatctgtattgatgggaatttccacatggaaactgttcaaaaaattaggatatagtccgcttttcgcgtttattcctttttacaactatttcattattttaaaagagacaaaacatccgaaatggtgggcaattttatcgtatctgccaatcgtaggacctattatgatgtctgtttttcatttgtatttaatgaaaaaattcgggaaaacgctctttaaggatcagcttcttaccgtacttcttccgtttatctacatggcaacggtaaattatggaaaagatgttgaattggaagacgaaaatgcaatattccttaccgacgaagaaaaaaacgcaaaaaagaaagattcatttgtgggatctgtgacgtttgccgtagttttcgcaacaataattcacgtttttgtaacgcagcctttcggaattccgacaggatctatggaaagaaccttattggtaggggatttccttttcgttaacaaatggagctacggatacagacttccgatgcgcccccttgcaattcctttccttcagggaaccatcatggatacaggagaaaaaggaaacccgaaagatgatcctaaatcttatgtagatgctgtaaaattaccttatgaaagaatttttcagttcaataaacctcagaaaaaggatatcgttgttttcaattatccgcaggattccgtgcatactgccatcgacagaaaagatccttatgtaaaaagatgtgtagccgttgcaggagataccttcgaaatgagagccggaagacttttcgttaacggaaaagctgaaacatttttaggagatcaggaagttcagcacgcatatacggtaaacacgggaacccagttagacattcccggactttataacacttacggattccttcctgtaagagaaattcagaacgaaaaaagcggtggatttgtatatatgtttcagggacttactgataaaacagctaaagagattaaagctttgcccaacgttatcagcatggaagaaaatatctaccctaaagattctgctacgatttcttataaattaaatgctgataaaacagcatacaccaaaagtattgataccacccagtctattttcccaatcaacaaaccttggaatcaggattggtacggacctttaaaaattcctaaaaaaggagatgtggttaccatcaatcaggaaaccttgccggaataccagtggattatttctcagtatgaacacaataaactggaaaataaaaacggtaaaattttcatcaatggaaaagaaaccaatcagtataccattcagcaggattattatatgatggtgggagacaatagagatgcttctttagatgcaagattctttggtttcgttcctgaagaaaatatcgttggaaagccaatgtttacatggatgagtgttgaaggggctttcaaagattcaagttcttcttatcaggcaaacggttggagaatccgttgggacagaatgtttaaagcaaccaatacaggagaagccaacaaaacgtcttactggtggattgcggcgatgattcttattctgttcttcgggtgggaatacttcgtgaaattattcagaaagaagaagaagacggaagacgatttgtaattcactttgttaaagtttaaatctttgacaaagtttcaaaatcaattattcaattgaaaaaataaattataaatagaatgaagtatttgaaaaaatacttcatttttgtattatgaatatgaagaatgtattattaccggcgttttatctgccgccaatttcatggttttcagtgtttttagatcctgaaaatgaaattatatttgaacagtttgaaagttttccaaaacaaacctacagaaacagagccaacatttttggagccaacggaaaattatcattaatcattcctattgctcataacggatgcagagaatttaagaatattgaaatttcgcaccgtgaagactggaggaatctgcattggaaatccattaaaacggcatatcaaagctctccgtattttgaattttatgaagataaattcagaaaaatttatgatctgaaagaaaaatatctgttggattttaacctgaaaactcttgaaatcgttcagcagatccttaaaacggaaaaggcacactctttgaatgaagaatatatcaaatttccggaagaaattaatttcagagatcaattttcagccaaactaccttcagaatttgaaatggacgagtattatcaaacgttctctgataaacgcggtttcctgaaagatttatcagttttggacttaatttgtaacaaaggaccggaatctttgacttatattaaaaatattaaatattcatagtaaaatgaaaaaggtattattagcagctgtttttttagtgggattcggtttctccaacgcacaggaagtgaaagcgggggcagatccgatgcaggataaagatcttatgacatggtatcataaagatttcgctacaacgaaagtttatggggtaaatacagaaaatgcctataagtttttagaatctaaaggtcttaaacctaaaacagttttggtgggagttttagatagcggagttcaggtagatcatcccggattggtaaaaaatatctggacaaatcctaacgaagtgcccaacaacggaaaagatgatgacggaaacggttacatcgatgatatccacggatggaacttcattggtggaaaaaacggagatattgatatcgataacatggaggtaaccagagttgttgctaaatataaacctgtttttgaaggagacgattctacaaaaaacaaagcaaatcaagctaaaatgcctgaagattttgccatgtatatgaaagccaaagatcttttcaccaagaaaagtgtggaagcaaaacagggtttcaaaacctattccatgattaatgaggcaatccctgtcatggtaaaactactgaacggaaaacctcttactcctgaaaatgttgccgctataaaaccggcagatcagagagaagcaatggctgtacaggttttaacacaggttgcgcagagtcctgaatttaaaggaaaatctgctgctgaattcgaaaaagcaatgagcggtcagattaaagaagctttagattattttggtcctcaggaaaaacaatacaatctggattacgatccgagaaaagaaatcgtaggagataactatgacgactattctgagaaaaactatggaaacaaccattacgaaggtccggatgcagaacatggaactcacgtagcgggaattattgctggtcttcccaacggaaaagaaatacagtacggagttgcttcaagagtagcaaaaatcatgtctgtaagaacagttccgaatggtgacgaaagagataaagacgttgctaatgccatcagatacgctgttgataacggagctaaagttttaaacatgagcttcggaaagccggtttctccaggtaaaaatgttgtttgggatgcatttaaatatgctcaggataaaggagttcttctggtaaaagctgcaggaaacgaaaacgaagatgtggcagaacatttagcttatcctaccaattttaaaaatgtaacagatgaaaaaccatttgtaaacaacgttttggttgtaggagcaagtaccaataaaaatgatgctttaagagcgagtttctccaacttcaataagaaaatggtaaatgtttttgctccgggtgatgaaatttattctaccgttcctcacaacgagtataaatatttacagggaacttccatggcttctccggttgtagcaggagctgcagcagttttattagcgtatatgcctaatttaactccggcacagatcatagaatcattggtaaaatccagcaacgcaagtaccgcaaaccaatttggggatttctctgaagcaggaggcgtaattgatcttaaaaaagcagcggaatatgcatatacaaacttctataacggaaaaggaggtgcttcaaagaaggctgaaaaatccgtaaaaaagactgttaaaaaatagtatatcttcctgtatttaagaaagaaacatataaagtccgaaattttcggactttttttattggtaatatttaattttggcacggttttttgtaactttattgtaacaaaataataaacaacaaaatgaaaaagttactacttgcagggatgttgggaacagcgctttttgcagtgtcttgttccgcagtaaataatgctaaaacagcccaaactcaaagatcagaatttttgaaaatgaaaggagactggcagatcgtcagtgttaattatgataaaaattttatagtaaagccatttgatgatggagtagatgcacagtgtttcgtaggaagtcactggagactgattcctaataactggacaggagcttataccttaaacggaggaggaacgtgcggaacaggatttacacagccaattaagattgatgtggtaagcggaaatactttcaatttcaaaaaaattgccgacggtacaaaagccaagcaaaatacagcaggatatactttaacgctgattaatcagaatacagaccaattctcattggaacagaatattcctttcgacggagaaaacgtaagagttgtttacaacttcgagagaacaggaatgaaataacttaacataaaaatataaaaagatgaaatttacaaaaacatatatcggagcgttatttttatcatcagctttattgcttacaagctgtgaggcggtacagaattctaatcatcagcaaagaggaacagcagtaggtgttgcttcaggagctgtaataggcggtattttgggaaataacgtagggaaaggtaaaaatgctgctttaggagctgttttaggaggtattatcggtggtgttgcaggtaacgttatcggttctaaaatggacaagcaggcaagagaaattaaagaaactttaccgggagctcaggtagaaagagtaggagacggtatcaaaattacgttgaatgaaagcatcgttaacttcgatttcgattcttcagctttaacaagtactgccaaaacaaacttagataaactggctcaggttttaacgaacaatccggataccaatattaatatctacggacatacagacagcaaaggttcagattcttacaacatgagtctttccgaaagaagagcaaactctgtaaaagcgtatttagcaggtaaaggaattgcttcaaacagattatttgctttaggtgaaggagaaagtatgccggttgctacgaacgatacagaagaaggtagagctaaaaacagaagagtagaattcgctattactgccaatgaaaaaatgattaacgacgcacagaacggtcaataattatttaacatataaatattttcgtgaataaccgcaatagcggttatttttgtatttttatggtgatattttttgaaattactatttttgcatttgaaacaacataaatgaagaaatatttaaagctgctccgtgttgagcaatgggtgaagaacctgtttgtttttgttcctctttttttctcgggtaatataaaaaaccttgatttactcgcaaaaagcatctttgcttttatcattttttctttggctgcaagtgtcgtttatattttaaacgattacaacgatattgaagcagataagaaacatcccgaaaaaaggagaagacctttagcgagcggagccatttcaaaatctcaggcggtaggaatttttacaggacttattattctggacatcgcactggttttctttgctcagatgtattttcatgaaagtttatggaaatttgcaaccatcgtaggattttattttgtaatgaatcttgcgtatacattcaaattaaagcacgttccgattattgatatttccatcattgcggtaggatttgtattaagagttttatcaggggggtatattacgggaataagcatttcacaatgggctatcttacttacttttgtgcttgcactggttttagccataggaaaaagacgcggagaactcattaatgcacaggtttcaggaaaaacgagaagagctttggacggctacaatgtacagtttgcagacattgcactttccatttccgttaccctcgctattgtctgttatctgatgtttacgctgtctcctgaagttcaggcaagatttcattcaagagtattttacaccgtaatttttgttgtttttgccttcttaagatatttacagcagactttggtatacaacagaaccgaatctcctacgaaaattgtttacagagacagatacattcagatcaccttagtgttgtgggttgctgcatttttaattcaaatctattttaaaaaatgaagccgaattttgtacaaaaagtaaccaactggggcaattttcccatagtggaaaaagaaatgaggtctgatgacagcttcagaaaaataaaagaatttgttctgaatcataatgaagtgattgcaagaggaaacggaagatgttatggagattcttcattgggcgagcatatattttcaaccaaaaaattaaataaattcatcagtttcgaccgtttgaacggtattattgaatgcgaatcgggagttcttctttctgatgtgctggaaattgccgttccgcagggatattttttatatgtaacgccgggaacgaagtttgtttctgtgggaggcgccattgcttccgatgttcatggtaaaaatcatcatgctgaaggatgtttttccgaatatgtgattgaatttaaactgatgatcgaaaacggtgacatcatcaactgttcaagagaagaaaattcagataaattctgggcaactatcggcggaatgggattaaccggaattattttaacggcgaaattcaagctgaaaaatattgaatcggcatacatccgtcaggaaagtattaaagcagaaaatctggatgaaatctttaatctgtttgaagaaagcgaaagctggacttatactgttgcatggatcgactgtcttcagaaaggtaaaaatataggaagaagtattctgatgagaggagaacacgcttttcagcatgaactgcctcagaaatttaaagaaaaacctttacgtctaaagaaaaaatttgaacctaccgttccgttttattttcccggatttgtcctaaatgctttaacggtaaagattttcaattatctctattataaaaaacagtccaaaaaggaagttaaaaattttattgattatgaaactttcttttatcctctggattttgttcacgactggaacaagatttacggaaaatccggctttatccagtatcagatgatgattcccaaagaatccggaaaagaaggaatgaaaaaaattctggaaaccattgccaacagcggaaacggttcttttttagctgttttaaagctgtacggaaaagaaaatccggaagcttacaattcattcccgtttgaaggatattctctggcattggacttcaaagttaattccaaattgaaaaagctgattgatcaacttgatgatattgtagagcagtacaacggtaaaatttatcttaccaaagacagcatgagcagatcttcgcttaccaactatctgaaaaatgtacagagctcaaaatttgtgtctctgcagcataaaagaattttaaataatatttagcagacatgatcgttttaggaagtacatcggaagtagcacaggcttttgtagaaaaagcattgcaggaaggagagaaatttgaaaaaatctatctttttacctccagtaaagaaacgaccgaaagatttgcaaggcatattgatgtgaaatttcttcagcagtccgaagtaatagagctcgatctcatgaaagggatagattacaatcagtttgactatatcaattcaaatttgctgttctgtgcaacaggatatttaggagagggaacagaagaaggattgtatgacaataaaaatacacaacggattattgatatcaattatgctaaactggttcctgtgatgaattattttgcgcagaaatttgaaagcagaagatccggaacgattatcggactttcttctgttgcaggagatcgcggaagacagagtaattttatttacggaagtgcaaaagcggcttttacagcgtatttaagtggtttgaggaattatcttttcgataaaaaagttcacgtaatgacggtgaagcccggctttatggcaacaaaaatgactgaaggtctgcctttgaatccaaaacttacggcaaccccgaaacaggcagcagaatttattttcaaagcttataaaaaacagaaaaacgtagcctatgttttgccggtctggggaattatcatgatgatcatcagaaatattcctgaatttatttttaaaaaattaaagctttaaaattattttatttaaaatatactttcgatctttacgttacaagataaatattctaaaattgacttaaagcgatgaaaaaactgtactgcttcgatttcgacggaacgcttacttataaagatactatgtttatgtatcttaaattctatgatcctacaagatttcgtttgcagtttttgaagcatgttccgctttttgttcttttaaaactgaaacttgccgatacggaaaaagtaaaaaaaagctttatcggttcaattctgaaagggcagactcaggaaaaaattgaaaaaaaatccagacagttctttgaacattattatcctaaaatcgtaagggaaaatgcattggattttattcaaaatatagatcataataatacgtacagtctattggttaccgcatcgttagacatttgggcaaaaccatttgccgaagcttttaaaatgcagcttgtttccaccaaggccgagtttagaaacggagtttttaccggaaattttgtgggaaaaaactgcaacggaaacgaaaaactggtaagaattcagcaggaaatcagcaatcataaatacgataaaattatcgcttttggagatacttccggagataagccgatgttgaagtgggcgaatgaaggacattaccaattttttcactaattttgggcggtaaaatatacagatgaagcagagccttttaaaacgataaactctactgattttgtaggttttacagattgtacatattccacagaaactaatattttcaaagtaaaaatgaataaagtataccttgataacgctgcaacaactccactttcggaagaagttatcgatgcaatggttgataccatgaaaatgaatttcggaaatccatcctctacacacagttttggtcaggaagcgaaaattcttatcgaaaacgtaagaaggcaggttgcagactatcttcatgtaacgcccgctgaaattattttcacctcttgcggtacagaatcgaacaatatgatcattaaatctgctgtcgagcatcttggaatagaaagaatcatcagctcaccccttgagcataaatgtgtttctgagagtgttttggatatgaaaagcagaaaaggagtagaggtaaactacatccgtcccaatgaaaaaggagatattgatcttaataaactggaagaactgttaaaagcttccgacaagaaaactctggtaagcttaatgcacgccaataatgagatcggaaatcttatcgatattaaaaaagtggcagaactctgcaaagcaaataatgctcttttccattcagataccgtacagacaatggctcacatgaatctggatttttccgatattcaggtagattttgcttcttgcagtgcccataaatttcacggaccaaaaggtgttgggtttgcgttcatcagaaaatcaagcggtttaaaaggaattattacaggaggaccacaagaaagaagcttaagagcgggaacagaaaatgttgcaggaattgtaggattaggaaaagctctggaaatctctcttaaaaatcttgaagcatatacccatcatatgcaggaaattaaaagctacgccgtagaaaggcttacagcggaaattccgggcattaaattcaacggaagaagttctgagaaggaaaacagtctttataccgttttaagtgctttattgccgtataaaaatccccttatcgggcttcagttagatatgaaaggaatcgcgatttctcagggaagtgcgtgttcttcgggagcctcaaaaccttctatggtgatgatgatggttttatctgaagacgaaatggatcattgcacgccgcttcgtatttctttcagccatttaaccactaaagaagatattgatgcactggcaacagctttgaaagaaatttctaaagatttcgttatagaaaatacaaatgttgagcatagatagtcttattactcaaaaagcgtaattttgattatccaattaaggaaattataaaagaataatattaatttaaataaaagaaacaaaaatggctttagaaattacagatagctcatttcaggaaacggttttaaaatcagataagccggtattagtagacttttgggcagtatggtgcggaccttgcagaacgttgggaccaatcattgaagaagtagcaaacgatttcgaaggaaaagcaatagtggggaaagtagacgtagataacaatcaggatatttctatgcaatacgggatcagaaatattcctacagttcttatttttaagaacggagaagtggttgataaattagtgggtgttgctccaaaagaggtgatcgctgagaaattgagcgcacacttgtaaaaaaaataaatttgataatgaacgccttccgttttcgggaggcattttttttgaaataaatttgcaggtaacgaaaaaagttgtacttttgccatcacaaaaaagaaacaacgttctttaaaaacaaaaacatgatccggtagttcagctggttagaatgccgccctgtcacggcggaggtcgcgggttcgagtcccgtccggatcgcaaaagtttttcaatttacttttaaaacaaaatttgatccggtagttcagctggttagaatgccgccctgtcacggcggaggtcgcgggttcgagtccnnnnnnnnnnnnnnnnnnnnnnnnnnnnnnnnnnnnnnnnnnnnnnnnnnnnnnnnnnnnnnnnnnnnnnnnnnnnnnnnnnnnnnnnnnnnnnnnnnnnaatttcttttaaaaaaattgatccggtagttcagctggttagaatgccgccctgtcacggcggaggtcgcgggttcgagtcccgtccggatcgcagaagttttctcaatttcttttaaaaaaaattgatccggtagttcagctggttagaatgccgccctgtcacggcggaggtcgcgggttcgagtcccgtccggatcgcaaaaagtcttctaagttttaggagacttttttatttttatattttcagagtaatttcataaactgtaatgtgtgcttttctgaaaaaccttttcctgaattttgtatacacatcattttttatatttccgaagtaatcttaaaattaaaaagaacttatgaccatactgaatttcgattggagcaacaaggctgcattaaaagaaaatcttttaaaatgggcttacgatgaaaatttaatccttttggaagatgatgaagatgttcttttttttgataacgaatggatgggaacaatttttccgtacatgtttgacgaaaaatgcattaagagagattatatcatctttattcttaaaaactatatcagagattgtttttcgcgtagaagatcactggcagaattgaaaaccattcaggagctatttatcgatgaaatgcaagattactgttctgtaaataatgaccaactgattaaagatgctatagcctattttttatgttgcaagaccagattagagaaaaataaaaagatctgataagatatttaaaatattcaactttgaagatgatattctaaatataactttcctaaaataaaattattggctgttaaacttactgattactaaaggtttttgtagtcaattctgcatagaatgtgataaaatatggcattttttaaaagtttataaattaatttttttcgttttttattaaatattcaattataattttaattttttctataataaaattttataaattaaagtattctttttaaattaattaaaatataatgtttttcattgtttatttggtttaaacttgtatattagacattaaatcacaaagttaaatgaaaattattcaattaatcacaagaagttgaataatgtcattaaaattatttcgaaaacctaaagtagttgctgttctgcaatctattccaaatacattttactgagcatttaacttgttagattataataataagtataaaaccttaacactatgaggttcatttttattgtatgcacatttttaatgtctcctctctttctgtctcaggtagggataaatacacccagtcccgatccttcggcagctctggatattgttgctaaagcatcagataaaggtttacttattcctcgtgttcctcttcaaaacattacagatattactacagtgcctaatcctgcagtaagcctccttgtatacaatacgacttcaaatgcaggaattaccaaaggatattattattgggacggaagcaagtggcttagatttaacgacagctcaaaaattttttacggaaatgcagatccaacgattcctactacgaattctaccggagatatatacgttaataattccaccggaactctttttgtgtataacggtagcaactggatttcgcaaatgtccggaacggaaatcctttctgtaaaaattattgctgcggacggtcagacagaattccccactccatggagcatcagtacttccaatgcaaaagtttacagaaatggggtaaacatagattttcaggttctttcttcatttaatataaaactggagaccggagtatcctgctatgccaacgatgagataaaaatttacaaattcttataaaaattttaaaattaaataacatgaaaaagtatctacaaacttccgcagttttagtatttcttttcgcagcttccggagctgtacaagcacaacaaacaacaggtgatgtagcccagaactctgctaatggagcggcgcaggctcttaacggaactatcagggtaattgataacaaaggaaccatcaaatatctacaggctaaaaacgggattacaacccttaccaatactacgaataatgtaacaacaacaacgtggcaactgggaggaacccttactgatgataccagtatagatcttaacgggaaaaaatttggtcttgccaatgtacttcagaataccaataccaatcaggcaggatctaatgttccggcaacttctgcaacgctgggaacttcgggatatacgattcttgtaagagacgaagctacaggaaatgtcttaaaaatgctttcaacagatcttgtacagagcggacatgaaaaatttacttcaacagcaggtcagacatcttacagtttaacaggagctcctgtgttacctacatattctcaggtatgggtctacagaaatggtgcaaaattaattgctaatgaagattatactgtttcgggatctgcagtgacgcttgttccgaacggaagtgctcctaatgattggtctgtattggcaggcgatattattgaggtgcagtacatgaagtaagattgttcctaaaaaccaatcatttattttcatattattgataaacacgagatgggcaaattattcgattttctttttttagttttatttgtttcgctctattcacaagtcagggttattgataataaaggtacccttaaacaggttgatgaatcgaaatggattttatccgggaataatatttataataaaaactccggaaatgtaggaattggtatatccagtccctcagaaaagcttgaagtaaatggaattgtaaaatcagtgggcgctgtttataccaactcggcgcttttcaataaaattttatatgcaaatgcttccggtaatgtgagtccgttatctttaggagccggacttacattctccggaggtattcttaatacagtgaatagtgggacagttacgagtgtaggactaagtatgccttctgctttcagtgtttcaaattctccgattaccaattcgggaacgattacagtctccggctcgggaacaattgctcaatatataagaggaaacggcactttagggaatttttctttatccggtttaagcgatgtatcgctttctgctcttacaacaggacagattttacagtataacggtacttcatggataaatatatcacccaattcaacgcttacaagaggtaatttaacgacaaccactacaggattatctgtaaccggagggactaatgctgttttgggcagtggaacagcggtggattataatttagtaacaggaattggaaatcttgctgcaggaactcagggaatttccggaggaactggtaatgcaaacacatacattggcgcagacggacagaaacacttgcttccttcggcatattctttaccaattgcaagctctacaactcttggaggggtaaagattggctcaggaataaatgttgctccagacggaactatttccacttccaatacgggaactgtaaccaatattgccacaggaacaggacttacaggaggacccataacatctacaggaactatatctttaagcaatacggcagtcactgccggaacttatggaactgcatctacaacgattcctactttcacagttaatgcacagggacagttaacagcagccggaacttatccagcatcaggaatatcaattgcaggcgatgttacaggaactttaggagcctctacagttgcgaaaattcagggaagaaatgttgcgagtactgcaccgactaacggacagacactaatttacaataccactacaagccagtgggaacccggtaatgatacatttcctcagttgcttgtagatgcttcaagaataacaacgtatactccttctgctacctatacagtgataccttataatagtaccgcagtaaatgtaggaacttcttataatacaacatcaggaagttttacggctccgggaacaggaacctaccagattatagcaaataacagttttaatgcaaatacagcagcaaatcattcaattacaaccagaattgttgtaaacggtacaacagatacagaatcatcctgttcggcatctccatatgcaggaagcggagttaatattacaagctctccgtcaacagtagtgagcttaacagccggacaaacggttaatatacaagtaggtggggaagtggggactgttactgctttaacagggacagggcagcacagattaaaaattatcaggttaaattaatttgaataattacccctttctatcttagatttcagtcaattcatacgatatttaacataactacatttaataattcttgattcaaaagattaactgttcaccgtatttttacggtaaattgattccgtattttttttatccgattttaggtctgatatttgtactgaatagaaaaaaaaattattgcccatttttatttatgaaaaacagacttgtgaaaaaatcatttctttatgcattctttatcagtttaatggtggtttcctgtaaaaaagaaattgaaaaaatcagcgacaaaatcagtgacaccacctcatcaataagcgaaccagatcccgaaaaagattccgtagttgtaaaaaaagattctgtaatagaaaaagaatctttacctccggcaatgcaggaagatggcttttataatgcttttattttccctaaagacaaaaaaatgaaagattctttattcggaatcttcaacaaaaaatatacagagaaagaacgttatgctattttagctttaaataggctggattccaaaaataaatggaatgcagatactttggtagttcctgcaaaaattgatactacattaatggagtattctcctttcccgatgcagcttgatgtactgagtccggtgaagaaatttgttattttttcatatcctattcaggcatacggagtatattctaacggaactttggttaagtggggacctacaagtatgggcaagaaaaccgcaaaaacaaagaccggtcttacctttgccaactggaaaaaacaactggcaatttcaaccgtaagcagtgagtggaaattaccatacaatttcaatatcttcaatctcgacggaatcggatggcatcagtatgatcttcctggttaccctgcatctcactcatgtttaagattattgatgaaagatgcaaaatggctttacggttatgcagatacatgggttttaaatccgggaggagcgactacaaaagcaaaaggaacggctgtaatggtttatggagattacggttggggaaaaagaaaaccctggagaaaacttcttagcgatcctaatgccaacagcgtttctgtagaagaaatgactaaaatgatcgagcccaatatcgaaagaatacttaaagaacaggataacagagaaaaagtggtagattctataaaagcggcaaaagctatattggaacaaatgccgcaaaccactaagaccgttgctccttaatccagtttttcaaactgcagcgtagattcttctgcgaattttctgagtttcagcatttcatcttttcctttatgctgcccgaaacgtgctgctgcataggtaagtgcaatgcagaataacatgataaaggatgcggtaagtgcccatggaaattcttgacttttaatttgtttttccacataatacatggaaataaagaccatccagagaatcgaaaacgcaaaatataaaaacataaaaaacgtccaaactgcggaactgggtccgaaaacgcctcgtatcgcagttttttcgtcttcaatttcaattcttaaagacaatcttggcttccagtaggtttcgtaatctgtttctacacagatggttgctacctctttattaatgttgccggaaaactcacctttatgttcttttagatattttttcagattttctgcgtattcatctttggttaaatgactaaacatcttaaatcggggtctggttcttattttgtccagcgtagtttcttcggttttcatatcattcttgttcttggtaaggtatcggatcctcgagagtaaagctcaaagtcatctgtttattttttctttcaatcagcatattgatggtttttccttcatcggatttcatcatttccatgattttattgagtgtcatgtcctctgtttttttgccattgatgcttattaagcgatcgtccttctgaagtccggctttagctcccggagaatctttacgaactccggcgatggaaaaaataggttttaaaacaaaattatactgaaggttattattgatcacttcaattccgttggaaggactttctttgcttttagcgggaagattcaccacatctttcgtccattccatgccatcctgcttaaaatccagaccgctcatattgaaatgaaaaggatcatcgtaatttccattcttttttaaatacattttctggtcagaatagtcgaatgcaaccgtaaaacgcctcatgatatctccgccaatggaaccttttctgttttccaccatatttacgtgctgaatggagtattcatcaggcattgccgttaatggcttttcaaatttaaaatctccgagatacaggttgtgaattctgcttcgtttaccatacacatcaccgttgaagccacgaccgagataatcatcaatattcggtcggttgtatacaaagtcttttatcaaagcaggaaaaagccacataggatcactattccccagatcaatcagtaattttgaaggctttcgttcccttgtcatttccacatcggcaattacataaggtttatttttttcaatactgatatcgatctctttaaaattttttatttttttctgaaataaagttttatcgttgtaaatggtaatttttttagacgaataatcaattaaaacaggatggtctttaaaaaaatgatagccaatgattccgtttacgggaattcctacgtgagaagaaatattaaagtcctgatcggtaataatatacaccgtcattgaattatttataaaattctttccaatttttgcaatattattatcggaacgaaatccgtcgatacttgcgcttcctcctaaaccggcaaattttatcttctcaatattctggagattgatttctttattttcaagactgaaaatagaagtttctgcgactccggtatcaagtaaaaaagtaagatttactccattaatatttacgggaataaaaattaaattggcaataagtttaaaagggatgacggttttttttgcatcctgaatttcaaaagaattctgagcactcataaaaatgcagaacagtacaaacacaaaaaaacacctcagtttcatttactgaatttactgaatttatctttatcaccaataaaaaaacattcccaaaatgagaatgtttgtattttgtttaataatttaaaacgaatgtttaaatttcgataatcttatttggaaaagaagtccatcagatccatataatttttctgattcactccatgaccgctcatatattctctgaacgtaaaataacagcttaaatcatataaaagatctgctgcttttcttccccattccaaaggaattacggcatcatccgttccatgagaaataaagaagcgaagtctttccagctttttcttatctcttacaatatcggtgagtaacttttcttccgggtaactgcttaaacacgccacaagattaaacatttcaggatatttcaaagccagagcataacataaaattcccccctgactgaaaccgcaaaggtgagtcttgccttcggtaattccataactgtttataattttaagaatactttccgtaacgctgtttaaagattctgtagcctgcggaacatcaataaagttgtcaggattgttaaaatcgatatcataccatgaaaatccttcaaactgggtatttctgggagctctgaagcttacgataatccagtctttaggaagagtttctctgaagctgaaaagatcctgttcattgcttccgtagccatgaagcatgaaaagaattgtggtgtcggaactgatattttcgggttctcttacaatataatctaaattcatacggcaaagataattattaatgatgtatttattctttagctccatcaaaataagaccatttaaaatagttggacaaactgtcttaaagtgcctgataaattaagacaatatccagccagaaacagcgttgtaattatttattgaattgatattatttgcaattcattgttggaaatttttcataaaagttatttttatattgataaaaaacctatatttggaacattaaaaatctatttggagaaatgaagcaattttacaaatcaaaaagtttacttagactttcttttttattcgctgtattattttcagcaatcttagttgttaattcttgtaagaaagatgacgatgatgaatttacagatcacattattcagtttgaagctaaaataaatacaaaaggtccaaatccacctgcaaatccacctgttacaggaactttttcaactgtagttacacaaatcgggacagggcagagtactacttttaatcctacaggaactacatggtccagcggagagcagtttgtaagctcaagtcaggctcagttgaatttagcagcaaatgctgttcttccttattcagattctgagctaatcatcaatatctatgtagacggagaagttgccaaaactaaaaaggttgtaggatcgggtacacaaagtgcttcaatttcttacagcttcttagaactataaaaaatcattcaaaataccaagaccatctgaaaaggtggtctttttttatgatattacctaaaaaatctggggcgcaaaattgaaaattttgcgccccagatttttatattttacgaaactattaaattactttcacaataaaataactcttctttcctttttgaagaagtaaaaacttgccgtcaatcagatcactttcattagctgtataaacatcattaattttctgtttattgactgaaatagcatttcctttcaactctcttgtcgcttcacttttcgattttaaaaatcctgatttttcagataaaagatctacgatatttacgcctaaaacatcattcttcaatacttctttttgcggaactccatcaaatacctcaagaaaagtttcttcatcaagacttaccaggtcttcagcggttgaacgtccgaaaagaatctcagatgccttaagtgccttttcgtattcatcttttccatgaacccatgttgtaacttcctcagctaattttttctgaagttttctttcgtgaggagccgttttatgatcttcaattaaagattcaatttcttcctttcttaaaaatgtataaaatttaatgaatctttccgcgtcttcatccgttgcattcagccagaactgatagaatttataaggagaagtcttctttttatccagccagtaattttctccgctttcagactttccgaatttcgaaccgtcggcttttgtaatcagaggaaccgttaaggcaaaagcttcaccctgtgcttttctgcggatcagttctgtaccggtcgtaatgtttccccactggtcagaacctcccatctgaagcttaacgccattattctgatataaatgtaaaaaatcgtatccctgaatcaactgataggtaaactccgtaaaactcattccttctgcacccgattctcccgaaaatcttttctttacagaatcttttgccatcatataatttacggtaatatttttcccgacgtttttggcaaaatcaaggaaagaaatatttttcatccagtcgtaattgttcaccagttccgctttattcggctcgcttcccgaaaaatccagaaatctggaaagctgatttttaagacagtctacataatgaagcaaagtatcttcatccagaagatttctttccgcagactttcccgatggatcaccaatcattcctgttgcaccccctaccaaagcaatcggtttatgaccgtgctgctgaaaatgagccagaatttttatctgaataagacttccgatatgtaaagaatctgcagtaggatcaaaaccgatataggctgttgtcatttccttatccagttgttcgtccgttccgggcatcatgtcggcaaaaagcccgcgccatttcagttcttcaataaaagagttcattattttctgctttaaaatttaatgtgcaaagataatcatttcaagggaataaggcgaagacagaaactttcaattcaggattaaaaacaggtttattttttaggagctgtttcctgctctccgcactcgctattttgtttgattttggtttcggcggctttgccgccgaaaccaaaatcaaacaaaatgagctcagacaaatgctgcgatcagggctaaacctcagccggaatacaaattgtacagaaaaaatcatttgatatcctgcgttgtattttcagctaaaatcaattatatttgttagtaatgaacgacgaacaattatttcctctcattcagaaagcgaaggaaaaagaccagaaagcgcagaccaagctcatcaacattttttgggttgatgttttttcttttgtaatgaaaaaagttcacgacgaaaatgatgccgacgaaatcaccgtgaatgttttttcaaaagttttatcaaagctggaaatgtttgatcctcattttcagtttaaaacatgggttctcaccatcgcgcagaataccatcatcgatttttggagaaaaaaaagccgcgaaaatcaggatcctacggaaaatttggatgaggtaaaaaaccagtatgccaaatctcctgaagaattgatgatttccgaagaagaacaaaagaaaatcatcaaaacaatagaatctttagatgtcaattatcaggaaatcataaggttaaggttttttgaggaaaaaagcatcaaagaaattgctgaagaattaggcatttctgttgccaatacaaaagtccgtgttatgcgtgcaaaaaaagtcttggcagaactgttgaaaaataatgagtttgaggatcaataatcacaagcttttaaaatcccgatcttagaatttaaaaaatataattttcctgaattttatcatattctgaataaattttcaataaatactgaaaatcatatatgattaaacgtttacattttctaaattcgtatgaaaattaagaaatatgacttttggaattgaggcagcaagctattatgtaccttcattatatttggaaattaaagatttagcagaaaaaagaggaatcgaacctgcaaaactcgaaaaaggattgggattgcataaaatgggctttcccgatgttcatgaagatgccgcaacatttgcagcagaagcattacttaaactcataaaggattataacatcaatccgaaagaaatatcaagaatttacttaggaacagaaagcgctttggatgccgctaaaccaaccgcttcttacgctatgcagatggtggaaaaagttctggaaaaagaattcggagaacgggttttcaggaactgtgatgtgttagacatgacttttgcatgcattggagcagtagatgcacttcataattctttagattttgtaagagcaaaccctaataaaaaagcggtagtcattgcaagtgattatgcaaaatacgaactggcttcttccggagaatatacacagggtggaggagccgttgcggttttaatttcttcaaaacctgatctcattgaaattgaaaacaattggggagttgccacagaatcggtctttgattttttcaagccgcgtcgtcatttcaaaaaagaagatttaacgaatgctcccgaaagttttccggaaaaaatagaaattttcacggatgagccagtctttgatggacaatattctaaccagtgttatcaggacagaattagagaagcttacaatcattataaagaaattacaggacttaataagccttacgaaaactggaaatatctgatcttccatcttccatatgcgttccacggaaagagagttttcacagaaatttacagcttagaaaacgatctgtcttacgaaacgcctgaagaacaaaaagcagtggcaaagtcagaagaataccttcagtttattaatgataaaattgaaaaatctcaacgcgcatcttcggaaatcggaaatatgtatacagcttccatttttatggctctactttccgctttacagacatcttttaacgagaatgaaaaattagcaggacagcaaatcggatttttagggtacggaagcggatcaaaatccaaagtttttgccggaaaagtttcagaaaactggaaaaaagtggcagaaaaatggaatttatttgaaagtttaaaaaacagaacagcaattgattttgagacatacgaaaaactccacagaaaacaactgcaaaattcagttaacgaaaactataaaggtttcggtttaaaatcagtagaactggaaaatcctgttttaaaaggcgcaagatattatcattatcagggataattaaaaatcaataataatattaaaagcatctcaattcgaggtgtttttttattccggaaacaaaactttatcctgataacttttcggcgttactcccactaattgcttaaataccctcgtaaaataattcgcatccgaaaaccctgtctgataagccgtttctttaatgctattctggttcgccaaaagttcttttgcccgattgattctttcctgcaaaataaactcattcggagaagttcccagttcgtctttaaacattttaaagaaattggatttactcacatatgccatttttgcaatgctgtctattgataatttctgatgaagatttttcttaatataatctaccacaaaaccaattctggatttgtttttaacaatatttttctccaccatgcttcttgcttgcgtctgcatcaggcggatcagaagttccttcaaagcaaaatctgccataatatccttttgtgaattatcgtccatggcaattctcatgatattattcgttgccgaagccaaagactgattattaaacagaaaatattcatccagttcaatattccagcgcgaagtttcgtctactttcggaagatgataattgaggtgattgagagaactctctatgaattcaggattcaggcttagagagatacactgcgaaggcgtttcatccgcttcaggaaaatcgatcaccattgtttctcccggcgaaaccaaaacactttctcccggataataatcgaaataccccgttttatgatctattttcatatgctttttcccgcgaagcattgccgtgaatgcaatcgtttcaaaatgcagttttacatcgaaagcagccttatgcgtttcgtagatactgaattcacaattgtttagattgaattttgtctgattttcaaccaagtgcataagctggttttcccttttcaattcaggagtttctaataaaatcttgttattgttcatttctaaacatttttaatagcctgtttactcaaatatagaaaataatcggcttacaagactgttaatgaaataataaaattttctgtctgtacgattttgaagtttttttgtacgattgtgctatcagaatcattgaaggaaatgtaatttggcaatagataaaaattaaaattgtacgaatatgagcactacaacacaacaacaatcagaaacattactccaatggcctgaattcaaaaaaagatatgataactacatcaacggacaatttacagctcctgttaacggacagtacttcgatgtagtttctcccattgacggtaaaaatttcacacaggcagcgcattcatccaaagaagaccttgaattggcggtaaatgcagccgaaaaagcattccaaacatggaaaagcacttcttccacagaaagaagcatcattttaaacaaaattgccgacaggatcgagcagaatttagaatacatcgcaaccgttgaaaccatcgataacgggaaagcggtaagagaaactttagccgcagatattcctttggcgatcgatcatttcagatattttgcctccgttatcagagcggaagaaggttctcataacgaactggataaagataccgtttcactaatcgttcacgaaccgcttggagtaatcgcacagattattccgtggaacttcccgatcttaatggcagtctggaaattagctccggctttggcagcaggaaactgcgtcgttttaaagcctgcagaaagtactccgatttccattatggttcttatggaactcatcggcgatttgcttccggcaggagtggtaaacattgtgaacggtttcggagcagaactgggaagagctttggtaaccaatccgaaagtagcaaaagcagcatttacaggttctacagcaacgggtagacttgttatgcagtacgcaacagaaaatatcatccctgtaacgttagaattaggaggaaagtctccaaacgttttcttcaattcggtaatggatgcagacgacgaatttttggataaagccatcgaaggcgcagttctttttgctttgaatcagggtgaaatctgtacctgtccgtcaagattactggttcaggaagacatcgcagatgctttcattgccaaagtgatcgaaagagtaaaagccatcaaagtcggaaatcctttagataaaaccgtaatgatgggagcgcaggcttcacagatccagaaagataaaatcctttcctacatcaaattaggaaaagaagaaggtgcagaagtgcttgtcggtggagatgtaaatcacgttggagaaggtctggaagacggatattatattcagccgaccatctttaaaggaaacaacagaatgagaatcttccaggaagaaattttcggacctgttctggcgttcaccaccttcaaagacgaagaagaagcattaaaaatcgcaaacgacaccatttacggtcttggagcgggagtctggacaagagatgcgcatcagctttataacattccgcgtcatattgaagcaggaagagtttgggtaaaccagtatcatgcatatcctgcaggagcaccattcggaggatacaaacagtcgggaatcggtcgcgaaaaccacaaaatgatgttggatcattaccgtcagaccaaaaatatgctgatttcctacaacaaaaacaaactaggtttcttttaatcttaaatattagggcgtgcccgttttccccgtctcggcaacggggaaaaacggtcgggctattaagggctccacttcgtttcggtgctccgtttcactccgcaccggctcgttcctcgccgcccttcctatccctcacgcgaacaaccattcgtcctgatccggaattttcgggtgagttgagaaatttcaattaaagatttcaggtttcggcgaaatgaaatttcgccgaaacttttaactttatgtaagaaagataataacgaaggaagaatctaaaccttatttataaagattcttcattgcgcttctgaactgtgttcgtacacctttaattcaataaaaataaagaaaaatgcaaacaaaaatagcaagactttcagcaaccgaaaaagctttggaagtcatttgggaactggaaaaaaaatacggtgacctgatgttttatcaggcaggaggatgctgtgaaggaacgcagccccaatgttttgaaaaaggaggattttacccgagaatgaacgatgctatgatcggtacgattaacaatcatgaattctggatcgatcgtgatctcttcgaatactggaaatattcacattttacactcgatgttgtcgatggcttcggaccgggcggattctctttagaaacgcctctgggaaaaacattcaaagtcatttacagacttttcacgccggaagaactggagaatttagaaccggtgaaacgcagtgaataaaaatctgctcaatcagcacaatctgcgagataaaaaaatataaagtctcatgcagatttatcagatgacacagatgtttaagttaaatattattcgtgcaattcgtgaaaaattcgtgcaatttgtgtttaggtacaaaatcaaaccttcacaaacctactcacaaacatagaagctaccaattgtccgaccgcatttaaaaccgttgccaaaggatctaccagcgttccgataatcatcactgccggaattgcttcctgtggtaatttgtaaactgaaatcatcaacatttctccgatatatcctccgttcggaattcctcccgcaacaatgcttacaaaaacagtaattcctaaagctaaaagaagattcataggatcaaaaaaatctcttccgatgattaagaatgccacataaatcttaatgatcgacgacatcgaagaaccgtttttatgtaaggttgttccaatcgggatcacaatatttgaaatctggcttggaattccgatttttgaagctgcgagtaaattggcaggcatcgtggcgaagctgctgcaggtactcaaagcggttaaagtagggaaaatagcatttgtccagaaacttttaaccccgttctgtccttttgccataaaagcatacagcgaaaagaagactaaaaaatagactactcctgcaatataatacaaccctaaaggttttgcataaaatccgaaaagctgaggtcccagcgtagcaacctgatacgcaaaatatgcgcccaaaccaatcggggcgactttcataatcaacaaaagcagttccttcatcacttcatagcccgaagcgataaatgagcggaaagcctgtcctttttcccctgcttttctggcggaaaatcccgtcatgaaagcaaaaattaaaagagccagcatattttgtcttgaaaaaagctgcgtaaattctcctaccgtaaaaaatcctacgattctgtttccccaactgtcattgctcgtggcttcctccacgatttccgagcttcctgaaactccggaaaccggaaaaagataaacggcacaaatcgtgaaaacggctgcagttaaaataaaaaacagaaaggtaaaagccatggttaccattatctttccgaacttagactgctgctctaacgaagcaatagaattggaaacggcaaagaaaaccagcggaactacacttacaaacagcaggttcaggaagatatctcccaaaggttttatataatccacaatatcgggagcaacaattccgatgatgcttccgacagagattcccaacagtaaaagtaaaattccggagtagtttttcaacacttctctcatgcgttgctttttaaccaaagatagcttaatttttaacattccgttatataaaattcagtcataaaatccttaaatttgagtaaacatcgtttctatggcttatatagattactataaaattttaggcgtagacaaaaacgcaacgcaggaagatatcaaaaaggcatatcgcaaactcgcaagaaaattacatcccgatctcaatcctgatgacaaggaagccgaaagacaattcaaagagctgaatgaagccaatgaagttctgagcaatcccgaaaaccgtgcaaagtacgataaatacggagaacactggaagcatggtgaagaatatgaaaaagcccagcaacagcagcaaagacaatatcaaaatcagggaggaaacttcggaggcggattttcggaagcggattttggtgatggggaagatttttcagattttttccagagtatgtttggcggagcaggaggaggtttcggaaggaattcaagaggaagtgcgtcgggaaaatttaaaggacaggatattcaggcagaattaactttaaccttgaaagatgcagcaacaacacatcctcagacttttgatatcaacggtaaaaaagtaagaattaccattccggcaggagtgtatgacggtcagcagattaaattaaaagggcacggaaatcccggtttcaatggcggtccgaatggagatttatacattactttcaatattactcctgatccgaattttgaaagaaccggcaatgatctgaaatctaaagtttcgattgatctgtacactgcagttttaggtggtgatgtaaaagtaaacactctgaatggaagtgtaaatctgaaagtaaaacctgaaacacagaacggaacaacggtgagactaaaaggaaaaggttttccggtgtacaaaaaagagggagaattcggtgatctttttgtgacctatgaagtgaaattaccgaccaacctgactgaaaagcagaaagaactttt
